United States Patent Application Publication US 2008/0039413 A1 - sequence listing, part 6

SEQ ID NO: 789 - DNA, 144708 bp, Mus musculus
  misc_feature (1)...(144708): n = A, C, G or T/U
ggtcttctccagttggagaggaaagaaatagtcctgaaaatagaatattaaaggcccaatgccagaatatttcatctaatactctggttgtgaaggacaacagactggactaggtgaagttcagtttcctcacagagtttcaaatatttctgacaacttatcctttatgttcttggtctctgcatacagcacacaccatggaagcagcttgcttcttttagctgtcaacacaaaccacacagctggctcctgacttcatcaagagaagggctacaagggcattttccttgtcttctcctttttccatttgctccttcccctcctctggctatcagagcatcttttgtcctaactcctttgtttaagagaattaattaccattatgatccccccagtgtctgtttagctcttttaggagatggattgcaaataggactccaggtggcctgacctgattccccagagttcccagaggactaacacccaactaagagacttttcaagaataatatttagtgagtgtggtagttttctgttgctgtaatagacatcatgaccaaaagcagttagtggaggaagctgtttgtctgtcttccagattaaggtgtgtcatgaagggaagtcagggcaaagaggccgtggaagggttcttcttgttaccttgcttcccatctcagcctgctttcattagcaccgaggaccaccagctcaggggtggcattgtccaaagtgcactttaccgctcacattaatcatcaaggaaattcaccataggcttgccttcaggccagtctgacacacgcattccccccctgcccctcaacttgttattgtcagtttcacatcatgcactccagtcccactcagctccctgtcccctcatgtccactttccacccttgcaatcccaccaaatcaaaatgaaaaacaaacaaacaaacaaaccaaaaagcagtaaacaaaacaaagcatagaaaagatcttatcatggaagctgtggtatatcccagcacatcctacagtatataatctctgcccacacatcttcacttgcaaatatgcattataatgagtcattggtttaaagtctctggcttctgtgacaccatcaatactggattgtcaccaggactcctcccagttatcctattggtgtcctgtagctttggatcagccccaaaagttcacagatgatgcagtttgggggatgagccaactcaaagccctggatctgggcctgggtggtagccgagcttatcagcctgctggcacttcttcatccacatcaacaggtccagcactcagcactgttccagctagcccacccaatgcagcactagcagaaagctctcctgctttcatgcctctagggctagcttacactcacccacacctctagagtctgctccactgtgctgcccaattgagacaaagacacagtctctcagatgctgtagcaggcaaaggtctggacctgctcccctggctcttacaccctcggggttggctcatccatgcctttgccacagctccactgtgttgcttaggcaaggtgtagggtccattcttctgaatgctatagtcagtgaagggaaggaccagctctttagctctcaggatctcagggcccagctatcccaactactgcaggtggtgaggggtggggaaagaggctatcacccctctccaatacacacacctctccctcccacaggcattcttaattaaggtttcctcctcccagataaatctgactctgaagtttagagaggttactgtgcctgtaaggagaccacatcccgggaagcagggtcaagcagttcagtgttatgttacattgttactcatagggttgtcttcctaaaggagtttctttcagtatacctttcggtgatttactgccttactactcttcataaaaactgcaagtatagctgggcgtggtggcacccctttaatcccagctcttgggaggcagaggcaggtggatttccagcctggtctacagagtgagttccaggacagccagggctacacagagaaaccctgacttgaaaaacaaaaacaaaacacctccaagtatcttgagtaagaaacttacccagcctttagatttatagatttattgatttattttgttttgagattggcctcaaatttgttattctcctgccttagctgcctgagtattgagattataggccatgtgtaattctctctctctctctctctctctctctctctctgagtccatatatatagtcaatcatccctagtgaatgtgaagtcttgagagcatggaaagtgctggtttgtattagcttgctgtgctctaagtaggcaacatgtgtggggataatttagcatcacagcctagagtacacacatattattcaaacattacatggtctggtgccagatctataatccctgacacacaggatactgaggtgtgtgtgtgtgtgggggggggtattgcaagttcaagtatgaaactgcttatagattagagcaagttcaacaccagcttaggaaacttagattcctatcaaaaagagggtttttaaattttgtttgtttgtgggtatcctctcccccacatgtatagcccagaggcagatacttggttagcatattggggaggggagataaaacaaatagtgaccacaaactagtgttttcagggagatcttccctcccccacccccatccttctttttctgacatacactttcaggctggcctataattcactacacagaccaggctggtcttgaagtcacagagatctgcctgccactgcctctagagtacaaggactaaagacaggtgtcatcatacctgcgaggttactgtgcctgtaaggagaccacatcccgggaagcagggtcaagcagttcagtgttatgttacattgttactcatagggttgtcttcctaaaggagtttctttcagtatacctttcggtgatttatttttattacatgtgataaatcaggcactctatgttttctctttcttaatgtggaaatgcattgatgcacaaatttaacttaccgagccacagtgagcgccttaaaaacagaatcctctgctagaaacagaatgggacattgggacagtagtgatacacagtgatcactgttttatttatttttattttttataccctgactgcagtttcctcttcctcctctcctaccagtccctcctacccccatttctcctctgcccccacatccactcttcctcagaatctcttcagaaaagcccaggcctcccatggatatcaatgaaacttggcatatcaagtttcagtaagactaggtacctcctctcttattaaggctgaacgaggcaatccagtaggaggaaaacgttccaaagagcaggttaaacagtcagagacagcccatactcccactgctagaaatctcacaagaagatcaaactttacaactgtaacatataagcagagggcctacatcagtcacatgcaggctccctgactgttgattcagtctctgtgagcccctatgagctctggctagttgatactgtggggtttcttgtggtgtccttgacccctctggctcctacaacccttcccttccctcttcagcaggatttcccaagctctgctgtgagtttctgtatctatttccatcaggtgccggctgaagcctctgatgacactgggctagatgccaaactatgagtacagcagggtgtcattaggaatcatttcattgacacttttttctttttactttttttgccaattgtatttgattctatcctagatctctgggatatccagcctctgggtcctggtcctccaggggtgggctccctctcatggcatagacctcaaactgactagtcattagttggcaactcctacaatttttgtgccacacagcacattttgtaagcaggaaaaaagttgtaggttgaaggttttatggctgacttgatatcccaatccctctactggaaggcttgcctggttacaggagatggccagttcaggatccatatctgccattgctaggagtcttagctaaggtcaccctgggaatttcccctacattcggttgctagcttgtcctggcaatgcccccccccaattccagttgtctctctttccatcccccccaatatgatccctcctttttctatttgttcactctccactttctcaataaatccattctgccacccccatctactcacagtgtctgttttatttctccttcccagtgagattcaaacatcagtccttaagtcctcctcgttatgcagcttctctggatctatggattacagcatgaatatcctttactatacagctaatatctactgacaaatgagtacataccatgtttgtctttctgggtctgggttgcttcactaggaatgatattttctagatgtaactatttgcctgtaaatttcatgatgttttttttaaacagttgaataatattccatgtaccagatttttttttatccattctttggttgagggacatcttctaggttgtttccattttctagttattaagaataaagcttctacaaatatagttgagcaagtgtctttgtgagatgatggaacatcctttagttatatgcccaggaagtgttgatatattgataactcctgaatcttgaggtagatatttttcccccaatttctgagaaactaccatattgattacaaagtggcagtatatatttgcatttccatcagcaatggaggagtgttcttcttgctccacatcctaattaacacaagctgtcacttgtgtttttgatctttgaaaatctgacaggtgagatggaatctcagagtcattttgatttgcattgccctgattactaacgatgttgaacatttctttatgtgcttcttggccatttgagattttcttttttaaattctgtttatatctgtatccaatttgtaatccaattatttggattgttgatgcctaatttcttgagttcttcatatattttggaagttagccctctgtcagatgtgggtttggtgaagatctttcccaattctgtaggctaccatttttgtcctattgacagtatcctcagccttacagaagcttataggttttatgaggttccatttattaattacttatcttagtgcctgttctatcagtgttctgtccaggaggttgtcttatctgccaatgcattcagggcttcccccccattttctcttctatcaggttccatgtatctggttatggtaaggtctttgatccacttgaacttgagttttgtgcaaggtgataaatatggatctattttcactctctctctcttttattactattatttttttagcatacagacagccagttagaccagcaccatttattaaagatgttttcttttttccattgtgtaattttggctcctttgtcaaaagtcagaagtccataggtatatggatacatctgggcctttgattcaattccattgatctgcctggtggttttaatgccaatgccatgtgtttggcttttttgtattattattattactatagctctgtagtacagcttgaattcagggatgatcataactttcttttggaggttcttttattgtactggattgttttaactattctgggcatgttgatttttccatatgaagttgagtgttttttttttccaagacctgcaaagaattggcttggagttttaataggaattgcatggaatctatatattgtttttggtaagatgaccatttatactatgttaatcctaccaattcattaacctgggagatcttcccatcttctaatatcttttccaatttctttcttcaaagatctgaaattcttgacatacaggtctttcacttatttggttagagtcacttccagatattttatatgatttgtgactactgtgaagagtattgtttccctgatttctttcttggtcgtttattgcttgaatataggagggatactgattttttttttgagctaatcttgtatcttgccactttgttgaaggtgtttatagctgtgggagttccttggtagaatttttggggtcacttatgtatactattatatcatctgcacatagcaatacattgacttatttccaacttgtatcccattaatccccttttgttgtcttattgccctagctaaaacttcaagtactatatttaatagatacagagagttggagagccttgccttgtccctgattttagtggaatgtttatatgcatttctttctttagggaatttttcatctatgattttgttaaatatattttacagtttttgagctagaatttttctcctttttctattcttattattcttagatttttgtctttccatagttccccatatttccttgatgttttgtgtcagtaacttttaaatgtaacatcttctttgaccatgcgtcaacttcttttatcgtattttctatgtctgagattctcttccatctcttgtattctgttggtaatgcttgtgttcctgttcttttaccagattttccatatccaggattctctccatttgtgttttctttattgcttatatttccactttcaggtcttgaacagttttattcatattcttcaccagtttgggttttcctggattctccaagggatttattaatttcttgtttaagagcctctatcctcttcgtaagattggatttcaggttctttcttttcttgtgcctcagctatgttagactatctagggcttgctgtagtaagatatctggattctggtggtgccactgttgttgatctggctgttttgattgtgttcttaactggtctctagtcatcttggtttgggtttacgtgacaatttttgagtttatctttgttggatggatgttttttggatttttttcccctttgtctctgtttcatctctggtcttctggcctgagtagcctgcggttctagcaaccagcaagtgagtcttcaggtcctactaggtgtgtctgctggggttgtagtgacttgtgtggcctccggggctccaggaattggcttggtctctggggttcctagtattgccttggcctccagtagattaggagtcttctgcaagagttgtgggttgggatattcaaccaatagtgggtattggtcactgttttgagttaaattttacataatgtatcgtggactttctggttctttggctgtttcttacattattattttttttcacatgaagtcatacagatcaatgattattatgagtgtgcgttaggaagtaaggtttcaagtctttcttctgctattcattatctgtaacctacatctgactgccccgtgcaatcctgcttgcccaatgagtaagatgggaataatgacagtatacacccagttgcaagggtggtcactgccatgtaatacccagggaacatcagccactgtttgcaagggtgaggtggggctttactcagcttgctcagtagaaataaagcaagtactatgtgtattgacatagaggactctagaaaatagattgccagtgcagcagatatcaaaatgaaagagtctcaagaataaaccaacacccccaagactaggggtggagtgccttagtgctctgagtgttgaacctggtcagtgcaggcatctgttttcttaaaggcagctctgcttgcagctcctctctccacaagaaatacttccatgctagcttctctttactcatttagaacaaattccagttcattacagaagctccaccaaaggtggttgtgctgctatgtgagtatattctgtaatgccatatccttcacaggggaatgtagcccacatcagagatatttaacatatttagtgtgtacttcttagccatttcttccacatttccatttgacattcaagttcctttctctgttttttgtttaacacatttacttcttgcttgcatgcaggtgtttaaaaatatatatgtggactggggcgatggctcggtgggtaaaatgcttgcttgctgcataagtataaggacctgagttcaaatcttaagaatccacataaacttggatttagtaactccaatctgtaattggagtgctcctatagtgaggtgggaaggggagccaggagaatctcttgaagcttctgggccagctaatctacatcatgactaacagaaaccttgcttcaagcaaggcagaaggctaggacccacaagagagactcctctcagacctccacatgtattccttggtattcacaggccagcacacacacacacacacactcacacacacatactcacacacacacacacactcacacacacacacacacacacacactcacacacacacacaaataaacttgtggcattaagagaaataacactgaacaaatgatacaataatattttaccatggcctatatcaaaacctatactaaaaacatttagcacatttggtacatagtatttccactcccacaaaaaattacatatggcatttgcctgtgggagaatctcaggtattagctagaagattagtttagaaaaattcaagttttgagaaatgatatagacataaatatgtgaataataaaaacacagtatattaatattgttcttaatgaaaaataaataccacaatttaaagatatgtggaagttattaaaataatattatttctatattgttgcacaaaataaaagtcttgttaaaattatgtgcagactacaaatttatgtcatttgataagaatcaaaaacatttcatggtatttaaatgcacagattaagttcttttaaaaggaattatgtatattttcctggagtacattattgttgtacttcacttttttgaggcaagatctcttcagtccagactgtcctggaactcttactgcaaccattttccagccatcattcccaaagtaaagtgtaaacaaaccattgttttagatttagatacaggagctgccacacaaaatccctgacctggctatttgcctataaattatatcttgaatatatattgaagtatatgctgaatatacaaattatatcctcttctaagactagctccaacacagtttgaactgcttttttttaaatcaaaaggtttactattttcagtctgaagaagtagatttcaagccttcagattccgttgtctactccgccttcttttatccagagctggacttaagacagctgagctttcctcatgaggtggttggctggaaagtttcacaggtcactacttgttaaatttaacaggtgacctgtaaaaggtttcctggggccaaaaagggtaacagggtagaagagtaaaagatgctcgcttcagcaataggcagcaaggcacatacagagagggcggggccgctctgcagcaggagacagcaaaaaaaaaaaaaaaaaaaaaaaaaaaaaaaaggccggagccggaagggcgggtctaggggcgtggcctagccggacgtgggcaggcctggcataggcggggcgggctttcagtggttgtcctggaagggcgtggtctactcttcgtgggcgtgtctggccgggcgcgggcgggcgggagtggctttatccgggcagaagtgagacagcgcaaaggaccatgggaaaggtgcccctatgaccccggcggagaacagtgtctcttaccaaacgcgtagcagttttagttaacaggtgaggggaggaaggcagtgtttgaagaactacctaagaaccctttcgcccgccccaagtccgggcgagaacttgatttgttcccgaggtctctccctttctgtctatcgacccccgaccttctcgcttctggggctgtgtgaagatggtgaagagtggccgcctaagcgcgccagcctgcgaagctcacaggcacgcggcagttggccgtatgcgcttgcgcgcaggtctaggcagggcggggcggggcggggcgtctcccgccgcgcgctggaggcggggcctaggccggagcgctgcgcccgcgggctgacctcgttgaagtcgacccatgacgtcaccccgccgtgacgcgtacgcagtaggaaaactgtaagtttgcgaggatcatgcagctctgccttgcagggctcgcggggcctacgttctgctcgctctcgcagtcgctgtgttggccgcgggcaccgggaaacctcgggttacacgggagctgcggagcgtgacgcggggctggtagtcgccccaggtgggagcgcgccctccctgcagagctggcttatggaggcgaggctgttccttagcctggcccacacctttccctctggcctttgacagccaagagtgtgcgactaaggcctgggaatggggaactggcgaggccctccttaaaattgataaagagattagatcttcaagtaggacatgcttggtcagtccgggatggtcagtctgcgccctcaaggactagctgccctggtccgccttcccttgggatcctgcaagtgcccaggttgcttatgacaaattacgtgcagtgttgcctcaagccttcttctttctatagggctgcagcatcttgaaaccctgtgagttaacctaagctatgtaatcctacacaacagttaagacaacatttattattctagggaatgtggtaatctatctgtatgtaaggatctttctcagggcttggcctcccccacacacctaccccaacccatcggatcatgacttttgaacctgaaggtatctcagctatagtatcagttgatcaggaaccaagaaataactagtatcaatatcacagagattttggcaatacttgttcccccagtttggccattaaagaaaaatgtttttagcagcccagaactagtacattatgctcaacacaagtactagagtcagcttgtctgtctttacggttttaaaatcttaccttcaaatgagttagttgcaacattgagacacttatccaactctgggacaagtactcctcaggaactttgaagggaatatacactccctaggatagacttatacagtagattaagaggccacatttttatgacttcagtggagagtgtaacatccttacagaggacttgaatcaagcagagcttctgagttttgttctcctatttgtagctttccaaagagaagtcacctaagtcttagaacttttttttttaaagtctgtctctaacctgggaggtgatagtatagctttgttacttttacagggatcagagagacctggagggagagcagctacgtatggtattgctgtttgcatcagaccccacccatgatgagatagcagattcagagtcagatctgtaaataaagtctgctctatagctgacttcctaggacagtggagaagaagacccaagcaatgagcacacaaagttatttgtgtgagtgcagtgaaggaaaggaaggagggtgtgaggatcagtaaaggctggtttgaatgagtcatttagggcagactgtctaagggagttggtgttgacttattctaaggtgggatagcagcccatcaggagcccaactggtggcattcaagctccctgggagatgcaggcaggagaaacacagtttaagaattgctgtagctacagatggagtagaaattgaactgaggaatatatagctagtggtaaagcccctgccctccgttcaatctctagttgggtgtagtggaaggagacagtataaccatctggcctggaaagcttaccgtatgcatggaaccattctaaacactgaacgtcttacagccacctttttagctaagaaaaatacctctgttattatagattagaaaactgctacacatgttaggtgtgtactcaagctaaaagcttaagagactcggactcttgcatattttactaaatttacattagaactgctgtcattttttttaccatttgaatttaggtcatctgacttgagaggctatgttccaaatgtctattctgtctcagagcatggcaaaattggagaaagaaagtgttgcccttgtaacctgcttggggggtggggtgaggggctggagtctgtggcaaagtagacatgttactctgaagttaatgaaaagccacaagacagtttgtgtcatagaactatgtgttttctacttcgctccatggagaattaagtgtagagttataaagtggaggagatagcttgaaaggggggctggaggtgggaggaggctgttgctgtgctgtaccttgagaagggagatggtgtggtatcttaggctggtggaagcaaatggggggatgacattgagaggtgaaactcaagactactgacagaacttactgatgtcccagggaggttaaggaaaaggaatagctcttcaggattgacatggaagaactaggagaatagtagtgccatgttctaaggtgctgtgttgctgaggtttgggaggagaaataaaagtctggtccttaagttctagatgcttgttagatgtagtaaatactaataattagcataatgtattatgaactagattccagacaaggttttcagtattcttacacatactcatttaatccttaaaacatttgtatgtcctaagaatttatacagtttgcagatgagaaaatggatgcacagggagctgccttaagtcatttagtagggaaggcttcagactgcttatctcaggtctttgtccattgccatgaggttgtgagtgttggaagggattcacccccaagtgctctagcttgcatgttaatgccatgcaggttaatgtctgtaactaccccattgtggacatgttgagtagatatgaaatgactgtggttagggatagaaatacacatacttttgaagagacagactgattttgttcttttctaatccttggttgataacaaggcaagagaaggaacgatacatggtaagactgtacaggctgttttttctttgtttgactggatcgttgtagctgtcccattcttctgtctccgatcgccacagtgttatgggtatagtgctgctgaggtttttgtctcattcacatctctatctttagtttccttccattgactcattcgtagctgggaagagcgactttctatgaagggtattggttaagtttggggagtttggagatgaataaacatgattttcttcctggaggagcatagcatgaggaaaaacctgtgggaatagaatcagagtagaagaaatgcatacatacatgctaatgaaggccccacacttgagagatggggtgtgaaagggcaaaagagcaaaaaaaggcctacacaattgcatgatggattggaagctccccaagagtccttttgaacaaaagaactactcaaagtcttgcatattttattaaatctgcattagttttaattggcactgataaaattttcatcaaatgaaataaattctgatatttgactatctctgtggagtggtgactttttctagttgtgttacctcagtgttgacagggttcactagtacaataaggaactggtttgaaatgttgttgcttgcaaagcagagggcagtggaggggccatgtatgaaatacttaggcaggtttccactgttcataagtgtgtcatgccaagttacacatgatagtatttgaattctctgttaaccagccccttatgatgaatacatatacatcttttgtctcattgctttaggcccatagtagcacaattcagtgtggggaggaacttatagtggaggaagtctgcctcctaaaagttccagccctgtaggctggccactaaaccttttgcatgtgagctgtttaagccccaaaccataatgcttgctattcattcattcattcattcattcattcatttttctctccttcatctttgtcaatgactgctctagcaatgcagatttaaaataggtgtattttatgtgtatgagtgttttatctgcaggttacccatgtgcaaacagtgtgcacagaagcaagaggagggtgttggatacccctagagctggagttgcagatacttgtgaacaccacaagggtgctgggaccaaaaccctgatcctttctacaagaaccatctcttcaacctcaaatttctttcatgtttttatacatactggactagctacttggttatacaattgttaattttcaaaaatagtcttctgtattagttttcatatgtagtttttggcagtatctgtaagatgtggtgagcatatattatcttcgtaatttgacaggtaagaaaataggtacaggtcaaatgatttgtcctttgtcaggacaagttagtgataaaagcagagttaagtcttaatacctaagactacttgaagttacctattattgttactcagtttatcttcttaagagtcctgtgatacgtagctattattcctgtcatatagagaaggaactggtcccccaactcataatgtgtacctttattgtttccactgagttgtactacccttccaaatatttccacattatatgaactagacttttgattaaatccacgagatctgttctctgactacattggtctcttggaacatagacttatattgatttccctgcttgagtcacttggtaaggtcagtgtttgtgatcctgcccaaatttgatttagattcctgattttgttaaactatccagtaacaagatttgctatttagaattttgtttttgagaagatgtaggtctagaagcagtacacaaaaatactctgatcagtatttgcctgtagctgaataaggaagtctgtagaaacagtccgttcgttcttctggttgagttctgtttaggcgaggacacccatttgtgccccttttgaatcagagtctctattatttttgtcagtggaggttcaaatatgaaaaagagatagaaaggttagccattttccatgtcaaatttgaggatacttccttttagagttttttttttcccctatgctgagccagtccttagaacaatattatggaggttgatgtattttccttctacaacagacttactctactttagtgggggtttcacttttgtaatgtgataagagctggtgagagttacttatttcttaaattgtaagcaagagattatcagtttgcccaaataaaacagtataagatttttgatttttacattttatataaatcaagttgggccatcatttttactagctaaataagatagctatttaagcagttattttgtttgaagattatttgatagcagttaattcttggtgtacattgtagcagtcggctgttttaatattttatatagtacatccactgattgaggttgatagtatgagattgtaagtcttgagggtggggaagagttgcaggcaaggatgactataattatacttaaaaggtcttgatgaaaattaccatttatgaagctggattgttttaacaaatatttttcttacccacaagaataaaaagagtaatattcaaatagccacaatattagctgtattttgacatgaagagatcactaaaatggagcgaaagcaaagatgggattgtatgttatttaagcaagagacagcacaatcctccaggcttttaaaggaagcatgatgtttaaaattggttaattttcataggtgacatagttgaaggattgactgactttaaacttgaaatttggagattggctgattttgaggtttccaaagcaaagctgttgctgactggctgaaattctcaactgaattgttgagaaatgttgaatagactttaaaaattgattgattgtgacagattgaaaaccagttttgtgattaccttttgcagccaacgaacaatcttcctttcttgaaaaatatgtaccttttaatgacatttatgttagcatatcaatgatagctactgagctaatataacatatcttgcttttgttttgaaacttaaaaaatatgttgtttctgtgggacttgttgttgttttttccattctcctgatattttatatttgagagactgccttgtgaaatatttaaaagtgatgtgttatttttagaaatgctctagttctttaaaaatcctgggaagccagcattattttttttgtctactttctttcttgaggtagtgtgtatcatgtccccaccaaagtcagtctttatagatgctcagtcacatacatgtataacagcttgttggtttgctctgagagatacagcctgaaccaactactttcagaaactagtcattgtttatcaacagtttagaagtttaatgactttaatatctgtgaatcattttactacaattatcatgatacaacactatttaaattacatcagctatttaatatttagaatgtttcttcttcagaaggaaatgaaaatctaagtactggtactaatataaagctttttttgtgacttgatctctcatagtaatatattttagaacctttttctgtacagatgttaaaataaacttatgggacattcatttcaaaattagacaagcaaaggttttggtgcaacttctttgtgtgtgtgcctatgcttatgtctgtgtccacgcacacaggccagaggatggcctccattattgttcctaagacattgttcaccttgggtggggttttttccctttcttcttcctctcccagagtcctttgttcttctttttctgcttgcacacacagaaacaggacagcttgcaaatggttctctccttccaccatacaagccctaaggcatcgaaccagagtttgataagcttggtggcaagtgcctttgcccaaggaaccatcttgctggctcccaccttttttttctttcttttttttttttttttttttcagatagagtttttaatctatagttggcctggagtctgctggttctgccaaggcgtcccaagaatccatctgtctctgtctcccctgtctggcaatataggcaagccccaccatgtctcgcatttttggagggtggagtaggttctgctgatctaccttaggtccttgtgtttgtgcatcaagcactttggggatgcatggttcctgagttgttataagagagaagttgtagaagagtgagtggattaatgacggcagatcggaaggctgaaggtcagtgacagtgctgccattgcttcctcagtgctgccaggaaggaggcgaggattccgaaatggttgttggttgaggaaggaggaaactgagggagtctgacctaataacctttcctttgtttctatagaagtgatgtactttgtttagtgaggggtgagtaggaagcttgaaaaagtggtagaagttaggatgtggttctgtgggaagtcagagaggagctgattgggacccaagaaagaatcactagccagcagtaagaaggacttacccaggtggggtgctgtgcatttgtagggttcacactctttctgcttggggatttctattacattgatttccagattgggtagatgaataggtgtttagtagagatagaagccaacagaactttgagaattaaagatcagggagtgggccaagctggatgggttgttcctaggttatgttgaaaaaggaataaagctgaaaacatggttaatacacaagaagaaaatagacagggaagtagagaaaaaaatggaagcttaagttggttgttcattcattcatccattaaatatttattgagcatttttctttcagacactgttccagataatgttgctaccttagtcaaaggagagatggaaatagtgtctgtcttgataggcattagttctatggtaaagtgaattgtgtgtgtgtgtgtgtgtgtgtgtgtgtgtgtatacacatgggcacacatgtgcacatgacaagtgtatagacatgcatacatgcacatacaaaattcaaaatggtaactattacaaaaaataaagaagagaagtgaaagagtgatacggatgctgttttgaagtaatgtgatcagaaaaatgctcttagaatggcattctaatgctcacaggcagaggacaatatccagggacataaccaacatagacatccacatggacatcccaaggtcaggaacagcactgactcctgggaagacttggagcatccctagcattgagaaatgtgagcaaagaggagagtggtaatcaattaggacagctgaaaggatttagggttttattgtgccttgggaaaacattggaaggtttgaatctgtcatacttttctgaaggcgcttacatttgctggtttttatagaactgattggcaatgggaattaaagaaaactgaaagagctagagagataagaggtagtggccttcaagagttctgacttatgcagttgagtgcttctgggtgaagaatcctgctgcttgctgctcctttaagcagacacacctactccacaataggaattctttgtggctagaggcctgacccagaccattggcttacaccgcaccctttcctgtttttactgtgatcctacccagcttcattattcattctcctatttttttcttcatcttgtcttttagatataatacacacacacacacacacacatacatagacacacacacatatatatgtatatatatatatatacacatatacacatatactcatatactcatatacatatatacacatatgcacatatacacacatacacacacacacacacatagacacacacacatatatatgtatatatatatacatatacacatatacacatatactcatatacatatatacacatatgcacatatacacacatacacacacacacacacacacacacacacacacacacacatatatatggtcttcctggctacaacttcgtctagatctgttttctgacctttttatgttttgcaattcagcaaactgcctttgtagcttagaattgaagttgcccttggaaccttggagcaactctgagcactactcccaaagacctccaggctctaaattcacagtgttgaaagagccctccattgaactgagacactgtccttcttgaagctggacatccctgaggtcacctcaagccgtgctcttccagcctaaggatcatcttaatccttaggcatgaagtttgccacaaatggcattgcacgttcaagttctatattgctgtacagagggcacttagcatgtgaggtggtgtatcgtcccgtgggagccttgactcactacccttttctaaattcatataataaaaattaatagacttctaaatacaaaacatgggctccacctgtcctcagtatagtctttattggttctaattgagtatttgtatattttacaataaaaggaaccatgtataatttataaagtggtattagtttgaaatgctttaacttctcagagttgtagttttctgtttttttttaatatttaatggaactattataacatgtttatatagcataagtaaacctggccaggacctagattctgaatcattagtcttttctgacttaatagaaaagtacaaaatattttctttttaggtgggtttgtatgtctaggtccgaggacaactttcagtagtcaggtcttaccttctgcctattttgaggcagggtctctgtcttctggtttctgctactgggctgcatactgcaagttagttggcccactagcttccaggggattctagtctccacttcccttgcagtaggagtgtttttaaacatggattccagtttgtactcagggtttctgttgtgttggagtagcaagtagtttcctagcaattctgttcccaggtagctacttataataaataaaatcacacagccacataatatttacatgtaaaggtcatgctgttattatgttaaatcatgctgttattatagtagttatcagtacagcccacccaaatttgtctaccaataagtgatttatgggtgaatagaatattatatctatgcaattgaatatcatttaccctttaaattgttggacatcctcacacttggtttaacatggatgaatattggcaccagataaaactgttgacaactggaaatgtggatattaagctgaagaggcaagaaaaatcatacctagaggtacccatctggtgattagcattttgttgcttgtagtaagtatcataggatttaatggtattacctggaagaaagcaatcagtttagtatttagaaagtatactttggtttgctggaatttgaaaacttacttaagtgactataaattggcaacaagaaaggaatcctaaattttctccccaagaataatttccagggataaagtcaagagtaaagaagtctttggaagatcacctccttccttagtagttactgtaggtcaggttaaaaattcaacagactaattttaaaagcattaaaatagtttttctcataaaaattcctccatataaacaaatatattaagcatcttcaaaatgctagagtgttacaagttttgggttaaataaatccttcttcaggtagtagagtttaagggggagattgacaggaatggtcaacatgaagtatgacacatgaagtacactgtggtaagagaacacctgcagcaggagtgggcagctcagtgtagagatctcccagagaaacgggaagggaagggttctgatgtgagtatcttagtgggaagaccctacagggagaaattcagtgtggctgacccatcaagctaggaagggagagatgggatacccttggagaaatgaacaaagtccattgaccaggtgctgtcccctgggacttggtgctagtggtagtcaagaaggattgcattttccagaggaaacaatagtatcctgtcttggtgtaggataaatggtagtcttaggctgacaatgtcacaggatgttgatagactagctcctgttgggtgattcatggttaatattcctacaggatacatgcttcagacctccaaagatatgctacaagttaaccagctttcaactgtgctggtgctgcttggatgcacatacattttaggggttttgtttttttgtgttaaacttgtgctttttctggtgctttgaggctatagtgttgacttttctcatttggtatgagtcaagtatgttattttactgatgtcactgaaatttattttcattaagcagatttagaaaacacagaagtgttttaataaattatgtggctttcaaaatgttcttcaaattaaagatctcatcagtaaactacattgtgtgtcacgagtctaaaaagtgaaaccaacatggaaattgttccaagtagtaaaatattgatatgtcttcactgttaaagtcattggaatgtagaaagtaaacaataaaagtttaaactatgagctttaaagaaagagttcctgagttcagtagctgttgtagcagtagatactcttaagtgtcagacatttcttaatttggaggctgcgatataactcagttggtagagggtttgtatagcatggctagaagatccccagcatggtatatatggggcatgatagttggcttataatctcagcattcagaagagggaggcaagagaatcagatgtacaagattatcttcagctacaaacttaatttgaggccagcctggtctgcgtgtaaccctctcttaatgattgttttcttcctttttggaataagaatgtctatatgtgtgattttattttacaggagctcacagtgannnnnnnnnnnnnnnnnnnnnnnnnnnnnnnnnnnnnnnnnnnnnnnnnnnnnnnnnnnnnnnnnnnnnnnnnnnnnnnnnnnnnnnnnnnnnnnnnnnnnnnnnnnnnnnnnnnnnnnnnnnnnnnnnnnnnnnnnnnnnnnnnnnnnnnnnnnnnnnnnnnnnnnnnnnnnnnnnnnnnnnnnnnnnnnnnnnnnnnnnnnnnnnnnnnnnnnnnnnnnnnnnnnnnnnnnnnnnnnnnnnnnnnnnnnnnnnnnnnnnnnnnnnnnnnnnnnnnnnnnnnnnnnnnnnnnnnnnnnnnnnnnnnnnnnnnnnnnnnnnnnnnnnnnnnnnnnnnnnnnnnnnnnnnnnnnnnnnnnnnnnnnnnnnnnnnnnnnnnnnnnnnnnnnnnnnnnnnnnnnnnnnnnnnnnnnnnnnnnnnnnnnnnnnnnnnnnnnnnnnnnnnnnnnnnnnnnnnnnnnnnnnnnnnnnnnnnnnnnnnnnnnnnnnnnnnnnnnnnnnnnnnnnnnnnnnnnnnnnnnnnnnnnnnnnnnnnnnnnnnnnnnnnnnnnnnnnnnnnnnnnnnnnnnnnnnnnnnnnnnnnnnnnnnnnnnnnnnnnnnnnnnnnnnnnnnnnnnnnnnnnnnnnnnnnnnnnnnnnnnnnnnnnnnnnnnnnnnnnnnnnnnnnnnnnnnnnnnnnnnnnnnnnnnnnnnnnnnnnnnnnnnnnnnnnnnnnnnnnnnnnnnnnnnnnnnnnnnnnnnnnnnnnnnnnnnnnnnnnnnnnnnnnnnnnnnnnnnnnnnnnnnnnnnnnnnnnnnnnnnnnnnnnnnnnnnnnnnnnnnnnnnnnnnnnnnnnnnnnnnnnnnnnnnnnnnnnnnnnnnnnnnnnnnnnnnnnnnnnnnnnnnnnnnnnnnnnnnnnnnnnnnnnnnnnnnnnnnnnnnnnnnnnnnnnnnnnnnccactttccttcctaggtcctttcctcccctaccccccgacttgtgattgctttcttctccctcccaagtgggactgaggtgttctcacttgggcatttcagcttgttgacctttttgagttctgtggactgttatcttgggtattctgtactttttgggtttttttttttgttttgttttttgttttgttttgtttttgcctaacatccacttataagtgagcacatactatgcatgtccttttgagtctgagttacctcactcaggatgatattttctagttccatccatttgcctgcaaaactcaggattcttaatagctgagtagtactccatagtgtaaatatatcacattttctgtatccattcttctgttgtgggacatctgggttgtttccagcttctggctattatatataaggctgctatgaacatagtggaacatgtgcccctgtggcatggtggagcatcttttgggtatatccccaagagtggtatagctgggtcttcaggtagatctattcctaattttctgaggaacctccagattgatttccagagtggttgtaccagtttgcaatcacaccagcaatggaggaatgttcctctttctccacatcctctccaacatgttacctgtgattttagccattctgattggtgtaatgtaatgtaattggtgcaaatcaaatcggggtcgttttgatttgcatttctctgatcactaaggacctggttgaaaataaggacatataatcggtagacacagaggactttctgacttattctgtaccttgaagagtctttgtttgatttctaccaaacttaagcaaaatagaatttcttccctgcatatgtaactccattttacctcctgtatttgtgctattattgtatattaaatctctgtatgtgagaaactcaaaagtagatcatcataacttacattttatataatccacccttagaagaagctggaagaaaggggaacatggaaatgtagatagttgtattagtctttctatacttcattgatggatatgagttggcaacattattattcattcttgacagcgagtacacaacatcaaaggtaggtagctcagcagcacaactgcaaacttcctgttttattgaattacactttgacaaggagaaaaggcaagaagcatgaaatttgaaaatcatttttaatcatgcacacagttacttttcgtggcatttcttttttgtaacttgaatttctgagttgtggttttccttctgtcggtgcatttgagttctttgtcctgaaggcctgttgccccagtttgcttctctttctggggagaaacatgcttgtaccattgtgtaagaactggggcaaaggtattgcttcacttctcccaaagtgacagctctgctttctcagggctgctgagagcaagaacattcttgctgtgtctatttgggtgtggagtcaggatgggctaggagtgctaaattcctgggttctctatctgctgcacctggtatgcagctttgctacagagcaaaggaactctggtcttttcagctgtgtctgttcagattagagttggcagtgaaggcctagggagagagcaccagcactctaccttcccagggggcagctgcatgcagtgctgaggggacaaggactgagcctgccctgagtttctgacattatttcttaggtcacagttggaagtatgggagaagtcaggagggagcagattgtggttcatgtcaccaactacctcttgctcaggctttgtgggttttcttgaatgaatatttatacatttgttgtatgttcttagaaaaatgttcagagactttgaatggttgctttgaatgcattttcccacttaaaattgtttattggagaattctgtgcacttctctttacagaatctagactcctatttttgcacatttaaaaggaattgataattttgtcccatttagtcagcctgttagttcacagattcctagtgttagattactgtcctatctttgtagtgtctgtgcagtttgaagaacctgggaagtttgactttgaccctttatccattccaagcttcagtgtttccatatttgtggcacagaccattatgttttcatgaactctgtaggtcaaattagcagctgactaatatctattctgtgtagtatagctctggctattttctatactgtgtagaagtgcaaagcatggctgatccacatggtggacttgttacagattacagagacccatgaccaaattctgatgtatccagtctgaggcaggaaaggcctgagaattcctgacaagaaactaaatgacatgatggtttctagtctggcatcttaagatcttagctgacatttgtgcttaccatattcattcattcattcattcatttatatactacagtgttgagaaagagtttctttgaaaaaacaccagtcttttctagtaaggccttcacctggctggataacgtccgccatacaatggagggtaatttatgtgatttaaagttatttaatggtaaatactaatcatgtccacttctgcagcatctgggcattaaatcctaagaaaatgaactgtcatatgtaggttagcctctgaatttattgttcaaattgagattatattgaaaagaaataacatttaattataagttttagtgttataaatgataagtaaatagaattccatattatacaattataaattttattatttcacttaaaattgtttttttaatcaaaactattgataaccctatataatattttatttccattttgaatgtcaattctaagtgcatgttagttcattaagttacatggtctttggatctggttaattttggtgtgttatgtttttgcttatttctaagaatttcttttataataaagttttaaaaagatcatatttttaaaacaaatttattctataagtactgacagtgtactataagtactgataaaaactgaataaaagctattttgatgaatttcctaacaatcaaaaaatataagtgaatttatcagtaaaagttggcatatatcatttagattctatttctctttaagatagagtctcagtatgaagcttagattggcttcaaatttaccaccttcttacctcaccctcacaagtgctaggttgataggtatatagcatcatagccaaattgttagtttcttaaccttaaatatgagtatttataattgaaataatgcatttaaaatgtggttgcattattttttattatttcataaaacttgagtgtttccaaattgtattttatagttactaaatttgaaattgttgattttaaagttatctttttctgtaaaacagaattttaaatatttaaaatatgactttatatttgtatgtactatgctacctggtaagttaaaagctgattctagctaactgacataataaatttagatttttaaaacacttaaatatgtaactattccaggccatatatctttataggtattcttctttttattctgtggaatattttaattcaacgaaattttttacaaaacaaagcttttcacagaaatctcttagaagtcttgaaaatgttactaaatttccatgctgctgttttgtggataatcttaggttcattttagcctactacagaataacaagttatttaaataaaaaagtatactctctctaaaaaccccatcctgcaaaaaccaaagacaacatatgtcattctatgcagggtgtggggtcaaggtgctaacagatggatggtgtggcgaagattcctttctgggtgcagatgcttgatcttggtcttgtggagagggagaaagaaaggggcaggagagagaaaacaaatgtgaatataaactcaattaagtatgtgacctattctaattccattttcctcctagaggacttaccttcacaggccctcacagtgggagttagcacttcagcggaagacttggagggagataaactttagctcatgtttccagctgacttaacttccacatgaaaccaagatttagattgtatgctagttggacattgtctttgcttttgatgattttacaaagtggctcttaaatactcaaagctggggaaatggcccaatagataagagcatttgctatacaaagacctgagttcaaatccccaatagtcccataaaaatctagacatggcctcatgggcctgtggtctcaatgttgcaggaaggagacaaatgatcctaagagctcacttaacaaccatactaactaaaatggagaggtttaggttcagtgaaaaaaaacaaaaacaaaaaaccccacaaaaaccacaaacttgtcttgatgaagcactcacatgcttacatacatatacaaatactccccccatttaattgtagtgaaacaaaattaagtactgctgtgatgaaatgaatgtctttctttaactcaatatggaaaatactcaccttccagttggcaacagtgcaaggccaccttcggtgtgaactcggcggacagtcccacagtccccagaggattctccactccccatgtgcccttgcacgcccaggatcttaggatcactggtgagtggaacacagcttctgctccaacacaaccagaagggcctggggccttcagtagcagggacacgagaaccccacccaactagtggctcaggttccttctggtctgcactggtctaccttggtttgcactggtctaccttggtttcgaactcagcagccaaggtccccagaggaagtaccacttccaggtactctaacacacacaggatattaggatcccaggatcccaggagcttggtcccaccaagatctcagggtctcagaggaagcttgactgccaagagactctgacacacccagaatcttaggatcacagaatcccagaatcacaagatcacagagaaagctggactctgaggagttctgacacaactgggattacaggaaggacagattccaatcagatatattgatgacaagtagcacttgagataataaggtggtggaaggcaagcataagaacagaagcaacggaaaccaaggttatttggcatcatcagaacccaactctctcactatagcaagtcctggatacaccatcacaccagaaaagcaagatatggatcgaaagtcacttctcatgatgatgatagaggaatataagaaggacataaatacctcccttaaagagttatacatgagaacacaggtgaacaggtagaagcccttaaagaggaaacacaaaaatcccttaaagaattataggaaaacacagaggggaagaaacaggaacaagaattgaacaaaaccatccaggatataaaaatggaagtggaaacaataaagaaatcacaaagggagacaactctagaaatagaaaacctaggaaagaagtcaggagccatagatgcaagcataaccaacagaatacaagagatataagagagaatctcaggtgcagaagataccatagaaaacattgacacaacaatcaaagaaaatacgaaatgcaaaaatttcctaacccaaaacatccaggaaatccaggacacaatgagaagaccaaacctacggagaatacgtatagacgagaaggaaaatttccaacttaaagggccagtaaacatcttcaacaaaattgaagaaaatttccccaacctaaagaaagagatgcctatgaacatacaagaagcctacagaacttcaaatagactggaccagaaaagaaattcctcccctcacataataatcaaaacaactgcacaaaacaaagaagtaatgttaaaagcagtaagggaaaaaggtcaaataacatataaaggcagacctatcagaattatatgtgagttttccccagagactatgaaagccagaagatcttgggcagatgacatacagacttaaagagaacacaaatgccagcccaggctactatagccagcaaaattatcaattaccatagatggagaaaccaaagtattccatgacaaaaccaaatttatacaatatctttccacaaatccagcccttcaaaagataataaagggaaaacgttaacacaaggaaggaaaccacgctcgagaaaaagcaagaaagtaatctttcaacaaacctaaaagaagatagccacatgaacagaattccaactctaacaacataaataacaggaagcaacaaggacttttccttaatatctcttagtgtcaatggactcaatttcctaataaaaagacatagactaacagactggttacataaacaggacccaacacattgctgcatacaggaaacccatctcagtgacaaagacagacaatacttcagagtaaaagactggaaaacaattttccaagcaaatggtcccaagaaacaagctggagtagcaattctaatattgaataaaattgactttcaacctaaagatatcaaaaaagataaggagggtcactccatactcatgaaagttaaaatttaccaagatgaactctcaattctgaacctctattctccaaatgcaagggcatctatgttcattaaagaaaatttaataaagctcaaagcacgcattgcactgcacataataatagtgggagacttcaacaccccactctcatcaatggacagatccaggaaacagaaactaaacagagacagtgaaaataatagaagttatgaaacaaatggatttaacagatatctataggacattttatcctgaaacaaaaggatataccttctcactaactcaaggtaccttctccaaaattgaccatatgataggtcacaaaacaggccttaacaaatacaaaaatattgaaataatcccatgcatcctatcagatcaccacagactaattctgatctacaataacaagtaaataatagaaataatagaaagcccacatacatatggaagctgaacaacattctactcagtgataacttggtcaaggaagaaataaagaaaaaaagactttttagaatttaatgaaaatgaagccacaacatacccaaacttatgggacacaataaaagcagtcctaagaggaaaactcctagctttgagtgtctccaaaaggaaactggaaagagcatacactagcagcttgacagcatgcctaaaaagctctagaacaaaaggaagcaaattcaccaaagaggagtagacagcaggaaataatcaaactcagggctgaaatcaaccaagtggtaacaaaaagaactatacaaagaatcaaccaaatcatgagctggttctttgagaaaaccaacaagatagatacacccttagtcagactcactagagggcacagggatagtatccaaattaataaaatcaaaaatgaaaagggagacataacaacagaatctgagaaaatcaaatcatcagatcctactacaaaagcctatactcaccaaaaatggaaaacctggatgaaatggacaattttctagatagataccaggtaccaaagttaaaccaggatcagattcatgatctacacagtcagatatcccctaaagaaatagaaacattcattaatagtctcccaaccaaaaaaaaaaaaaaaaacccaacccaggaccagatgggtttagtgcagaattctatcagacctttaaagaagacctagttctaatattcctcaaactgtttcataaatataaacaaaagcttctctacacaattactctgatacgtaaaccacacaaagtccctacagagaccaatttcccttatgcatatcgacataaaaatactcaataaaattctcgcaaactgattccaagaatacatcaaaaacgatcatccagcatgatcaagtaggcttcatgtcagggatgtaaggatggttaaatatatggaaatctatcaacctaatccactatataaacaaactcatagacaaaaatcccatgaccatatcattagatgctgagaaagcatttgacaaaatccaatacccattcatgataaaagtcttggaaagatcaggaatgcaaggcccatatctaaatataataaaagcagtatacagcaaaccagtagccaacatcaaactaaatggagagaaacttgaagcaatcccactaaaatcagggactagacaaggctgcccaacctctccctacctattcaatatagtacttgaaatcctaggcagatcaattagacagcaaagggagatcaaagggatacaaattcgaaaggaagaagtcaaaataccactacttgcagatgatatgatagtatatatatgagaccccaaaaattccaccagagaattcctaaacctgatgaacaacttcagtgaaatacctggatagaacatcaactcaaacaaatcaatggcctttctctacacaaaggataaacaggctgagaaagaaattagggaaacaacacccttcacaatagtcatgaataatataaaataccttggtgtgaatctaaggaagtaaaagatctgtatgttaagaacttcaagtctctgaagaaagaaatcaaagaagatctcagaagatggaaaggtcccctgtcttagttagggttttactgctgtgaacagacaccatgaccaaggcaagtcttataaaaaacaacattggggctggcttacagtttcagaggttcagtccattatcatcaacatgggagcatggcagcatccaggcaggcatagcgcaggcagagctgagagttctacatcttcatccaaaggctgctactggaagactgacttccaggcaactaggttgaagatcttatgcccacacccacagtgacacacccattccaaccaggtcacatctattccaacaaggccacacctccagatggtgccactccctggtcaaaggatatacaaaccatcacattccagtcccttgtccccatatacttactcgaaaacatgagtctatggaagccatatttaaatatagcacaatgcaaaatgcatttactccaactttcaaagtcctcatagtctatagcagtctcaacaatgttaaaagtccaatgttcaaggtctcttctgagattcatccaattaattaactgtaatccccaaagcaaggcaggaaaccagctgggcaaactccaaactctgcatctccatggctgatgtcaaagcggtcttcagatctccactcctttttcatctttgttgactgtaacaaactgctttctcctgggctagttccactccctgttagcagctttcctcagcatgtatcccacggctctggcatctttaacatcttaagtctccaaggcaatttcaatgttacagcttcttgtttcagtgtctgggattccatttgatcttttggactcctcctaagggctggcatcacttctccagctctgccctctctagcactctaagcttaggttgatccactccactacggctgctgttcttggtgatcatcccatggtaactgacatctccaatacactggggtattccactccaactaggcttcagcaatagcctctcataggccctcttcatggtgccatgcctcaaatcctttgcctgaccccttcagtcctgggccatcaactacagctgaggctataccttctccagtggccttccatgacctctcacagtgccaagcctcagctgttcttcatgaccccttcatgccttcaaaaccagtaccacctgggtgattcttacacattaccacattcagctgcagcatgaggtatctatctctggaacacagcttctttgtgctcccggaaaacacttcccagaagatttcacctcagtgatgctggtctcttcataatcactgctaatttcttagctccagctaaccagcatcaattgtcctgatagttccttccattcttaactctagagccagaaccacatggctgaagctgcggagttctgctgcttgcaggaattagaacatgacctgcttgtactattgtattgtcactggctttcttttttccaaatccttcactacctaagctaggctatcctgggtcttgctctgtagactggccttgaatgcagagattagcctgcttgtctcctgggattaaaggtgtgtaccaccacgcctggatctaaatttagctgggtaggatcttgtcccaaggtctcactcccttaatctgttatctcccagaacacaggattttgctccatttcacttcctggtacccctttaatactcgaaccatatattttatattttttctttgtaagcttgctatgcttgttaaaacttctctttataagacttaaccagagaataaagtctctgctgggcttttttgaaacttcctttgtcaatgcaattaatctgagtctcttcaccttattctcaggcagacttttcagacaagggcaaaaagtagccacattcttcaccaaaataccacaaaaacagtctttatgccacattctgaaattcttctcctttgaaatctcttgggccaggtcaatacagttcaaattactcccaacaacaaagtcttccatattcctactaggatgacccattaagccccatttaaagcattccactgcttttccaaatccaaagtcccaaaatccacattatttcaaataaaagcatggtcaggcctatcacaacaataccccactcctggtaccaacttctgtcttacagttttactgctgtgaacagacaacatgaccaaggcaagtcttatttttttttaatattctttattaggtattttcctcatgctatcccagaagtctcccatatactccccccaactcacctacccaccaactcccactttttggccctggcattaccctttcttgcggcatataaagtttacatgtccaatgggcctctctttccagtgatggccgactaggccatcttttgatacatatgcagctagagtcaagagctctggggtactggttagttcataatgttgttccacctatagggttgcagttccctttagctccttgtgtactttctctagctcctcaattggggtccctgtgatccatccaatagctgaccgtgagcatccacttctgtgtttgcttggccacagcatagtctcacaagagacatctatatctgggtcctttcagcaaaatcttgctagtgtatgcaatggtgtcagcgtttggaagctgattatgggatggatccctggatatggcagtctctagatggtccatcctttcgtcacagctccaaactttgtctctgtaactccttccatgggtgttttgctcccaaatctaaaaaggggcaaagtgtccacactttggtcttcattcttcttcagtttcatgtgttttgcaaattgtatcttatatcttgggtatcctaagtttctgggctaatattcacttatcagtgagtatatattgtgtgagttcctttgtgattgggttacttcactcaggatgatgccctccaggtccaaccatttgcctaggaatttcataaattcattctttttaatagctgagtagtactccattgtgtaaatgtaccacattttctgtatccattcctctgttgaggggcatctgggttctttccagcttctggctattataaataaggctgctatgaacatagtggagcatgtgtccttcttactggttggaacatcttctggatatatacccagaagaggtattgcgggatcatccagtagtactatgtccaattttctgaggaactgccagactgatttccagagtggttgtacaagattgcaatcccaccaacaatggaggagtgttcctctactccacatccttgccagcatctgctgtcacctgaagttttgatcttagccattctgactggtgtgaggtggaatctcagggttgttttgatttgcatttccctgatgattaaggacgttgaacattttttcaggtgcttctctgccattcagtattcctcaggtgagaattctttgttcagctctgagccccattttttaatggggttatttgagtttctggagtccaccttcttgagttctttatatatgttggatattagtcccctacctgatttaggataggtaaagatccttttccaatctgttggtggtctttttgtcttattgatggtgtcttttgccttgcagaagctttgcaactttatgaggttccatttatcgattctcaatcttacagcacaagccattgctgttctattcaggaatttttctcttgtacctatatcttcgaggcttttccctactttctcctctataagtttcagtgtctctggttttatgtggagttctttaatccactcagatttgactttagtacaaggagataggaatggatcaattcccattcttctacatgataaccgccaattgtgccagcaccatttgttgaaaatgctgtcttttttccactggatgattttagctcccttgtcaaagatcaagtgaccataggtgtgtgggttcatctctgggtcttcaattctattccattggtctacttgtctatcgctattccagtaccatgcagtttttatcacaattgctctgtagtacagctttaggtcaggcatggtgattccaccagaggttcttttatccttgagaagagttttgctatcctaggtcttttgttattccagatgaatctgccgattgccctttctaattcgttgaagaattgagttggaattttgatggggattacattgaatctatagattgcttttggcaagatagccatttttactatattgatcctgccaatccatgagcatgggagatctttccatcttctgagttctttaatttctttcttcagagacttgaagttcttatcatacagatctttcagttccttagttagagtcttgccaaggtattttattttatttgcgactattgagaagggtgttgtttccctgatttctttctcagcctgtttatcctttgtgtacagaaaggccattgacttgtttgagttaattttatatccagctacttcattgaagctgtttatcaggtttaggagttctctggtagaatttttagggtcacttatatatactatgcaaaaagtgatattttgacttcttcctttccaatttgtatcccttgatctccttttgttgtctagttgctctggctaggacttcaagtacaatgttgaataggtagggagagagtggacagccttgtctagtccctgattttagtgggattgcttccagattctctccatttactttgatgttggctactggtttgctgtagattgcttttatcatgtttaggtatgggccttgaattcctgatctttccaaggcttttatcatgaatgggtattggattttgtcaaatgctttctccgcatctaacgagatgaacatgtggctttggtctttgagtttgtttatgtactggattacgttgatggatttacgtatattgaaccatccctgcatccctgggatgaaacctacttggtcaggatggatgattgttttgatgtgttcttggattcggttactgagagctctattgaggatttttgcattgatattcataagggaaattggtctgaagttctctctctttgttgggtccatttttggtttaggtatcagagtaattgtggcttcatagaatgaattgggtagagtaccttctgtttctattttgtggaataatttgtgaagaactgggattagatcttctttgaagatctgatagaactctgcactaaacccatctggtcctgggcttttcttttgttgggagactattaatgactgcttctatttctttaggggatataggactgtttagatcattaacctgattttgatttatctttggtacctggtacctgtctagaaacttgtccgtttcatccaggttctccagttttgttgagtatagccttttgtagaaggatctgatggtgttttggatttcttcaggatctgttgttatgtctcccctttcatttctgattttgttaattaggatgctttccctgtgccctctagtgagtctggctaagggtttatttatcttgttgattttctcaaagaaccagctccttgattggttgattctttgaatagttcttgtttccacttggttgatttcacccctgagtttgattatttcctgccatctactcctcttgggtaaattttcttctttttgttctagagcttttaggtgtgttgtcaagctgctaatgtgtgctctctctagtttctttttggaggcactcagagctatgagttttcctcttagaaatgctttcattttgtcccataagtttgggtatgttgtagcttcattttcattaaactccaaaaagtccttaatttctttctttattccttccttgaccaaggtatctttgagaagagtgttgttcagttttcacgtgaatgttggctttctattatttattttgttgttgaagatcagccttagtccatggtgatctgataggatgcatgggaaaatttcaatatttttgtatatgttgaggcttgttttgtgaccaattatgtggtcaattttggagaaggtgccatgaggtgctgacaaaaaggtatatccttttgttttaggataaaatgttttgtagatatctgttagatccatttgtttcataacttctgttagtttcactgtgtccctgtttagtttctgtttccatgatctgtccattggtgaaagtggtatgttgaagtctcccattgtgtgaggtgcaatgtgtgctttgagctttactaaagtttctttaatgaatgtggttgcccttgtatttggagcatagatattcagaattgataattcctcttggaggattttacctttgatgtgtatgaagtaaggcaagtcttataaaaacaacatttaattggggctagcttacagtttcagaggttcagtccattatcaccaaggtaggagcattgcagcatctaggcaggcatagcgcaggcagagctgagagttctatgtcttcatccaaaggctgctactggaagactgacttccatgcaactaggttgaagatcttatacccacactcacagtgacacacccattccaaccaggtcacacctattccaacaaggccacacctccagatgttgccactccctggtccaaggatctacaaaccatcacatgctcatggattggcaggattaatatagtaaaaatggtcatgttgctaaaagcaatctacagattcgatgcaattcccatcaaaattccaactcaattcttcacagagttcgaaagggcaatttgcaaattcatttggaataacaaaaaccctaggatagcaaaactattctcaacaatagaaaaatctctggtggaatcaccaggcctgacctcaagctgtactacagagcagttgtgataaaaactgcgtggtactggtatagtgacagacaggtagatcaatgggagagaattgaaaacccagaaatgaacccacgtacctatggccacttgatctttgacaaagaagctaaaaccatccagtggaaaaaagacagcattttcaacaaatggtgctgcctcaactggcggttatcatgtagaagaatgtgaattgatccattcttatctccttgtacaaagctcaagtctacgtggatgaaagaactccacataaaaccagagacactgaaacttatagaggagaaagtgggggaaaatccttgaagatatgggcacaggggaaaatttcctcaacagaacaccaattgcttgtgctgtaagatcaagaattgacaaatgggacctcataaaattacaaagaaaagacactgtcaataagatacaaaggccaccaacagattgggaaaggatctttaccaatcctaagtctgataggggagtcatatccaatatatacaaagagctcaagaagctggacttcagaaaatcaaataaccccattaaaaatggggtacagagctaaacaaagaattctcaactaaggaatatctaatggctgagaagcagtaccagttactaggtaagcctgtggccttgttctctggggtgttcctgccagtgactctaggagacagttctatgctcagcactgggacttttgactgatgtttgctcagtggaatctttgatgtactctgatctcagtcctgtgacttcagcaagtgaacaactttgctttctatgtgtgtcacaaggtttaaacatgctttcttagatttttcagaacagttgggaaaccatttaggggaggaagggctcttgtcttggagtgggtgggaaaagatgaagtatgttagcagttactaatggtaacatcattaaattatttccacatatgaggcttatattaatcatcttttgtagcatataattgtgtgactggaccaccaaaatgtaagaaggaacagtctcaccagaatgcctggtcagggcaaggctggtagcaagaaactcagtttgatgtggcatttgtaaagccatggccatggagagatcgatctggctttgttcacttttctcctgagacccttgcaaatcattctttttttttttttttttctgggactccaattagatctagtaagtgaaaatgttgcctaagattctatgaagtcaggaggaagaactcatttcttcttttaaataaggacaattacaagaaggaacatgtgagtcttctagttatgctctaacataatactagctaagcaagcctcctgcagctgatcttccccatcataacacctgcgaatggtctaagaagagaatgactcataggagtgttaacaggtcatctttccatgaacaaatgagaaaggatgcttgtcttttccactgggatgtatattaggatggaggacactgggagctggacccatggttgtaataggcagacagactgcaggtcccactggacagttttcttctgtgataagctcctgagtgctggtaaggactgtacacctgagagcatttcacagaagcagtgaaagggtgctctctgcgctgatttcttcagaatttaactgattgtggtcaggaacaggcttggcagagctttcttttttttgttgtttttgttttattttgtttttgttctatattttaaatttcattgatattactagtcacatgattattttcagtatgcccaaaccttccattattcttgaataagactgcccaagctttaaagcatgtggaaccaattttttttaattaggtattttcctcatttacatttccaatgctatcccaaaagtcccccataccctcccccccannnnnnnnnnnnnnnnnnnnnnnnnnnnnnnnnnnnnnnnnnnnnnnnnnnnnnnnnnnnnnnnnnnnnnnnnnnnnnnnnnnnnnnnnnnnnnnnnnnnnnnnnnnnnnnnnnnnnnnnnnnnnnnnnnnnnnnnnnnnnnnnnnnnnnnnnnnnnnnnnnnnnnnnnnnnnnnnnnnnnnnnnnnnnnnnnnnnnnnnactcactcccactttttggccctggcattaccctgtcctggagcatataaagtttgcatgttcaatgggcctctctttccagtgatggccgactaggccatcttttgatacatatgcagctagagtcaagagctccggggtactggttagttcataatgttgttccacctatagggttgcagatccctttagctccttgtgtactttctctagctcctccattgggggccctgtgatccatccaatagctgactgtgagcatccacttctgtgtttgctcggccccggcataagtgataaaaatatcacagtagttaaggagctgacacattgctgggcaaatgaaagccccacagcagtcacaggatgattcttttcttcaaagaaagtctttgctctggctgtatcatgaaggaagagctatcacgaaagcctgtccagggcagcacgggaaaaaaaggctatactgatttggtcatcacattgagaacaaaaaaagctggaatcattttatttccttgtctttcaggagcatttgtgggaagttttcaggagctgtcttgtcttaataaacaaagtatgccaggaataaatgcaaaaaaaagtcaagtaaaatatgaacttagattaataggtacatatggtttgcttttaaggtccagttgcatttgaggggctatgctaagagtgtctttgagtgagtccagcaggtaaatgtctggtatgtgtcattcaggtttgtgtggcatttactctgggttaggcactgtggaatcttgataggtagagcagggtgagtaaacagaatgaatgatgcagatagctttgctgtgttcttagaacccaagtctcaagcacctatatctcctgattctgcaagacattaggactcagcctgatagaatggaagaagtcaactgctggaggaaccagagtttgatgatttttttgagggagctacttgatattcatcaggtccatggtttagcatctgggagaagagattgttgacacttgtgctgtccattttcaagaaataaaactgaaggcaaagatgatgttcatgatgatcgaggtgccatgtgctgcctacaaattatatccagaatttattatttgaaatgaaggatgataccttatgagcaacttcattttttaactaatccacagaaaggctcttcttgcaatttaaatacacttaaaaagattatcgaatctaatttctcatgtccacattcttcttgtgtgtgtgtgaatttcctatctagcccaatgtcttcctgtccaaggcaaaggctggtttttctagccattttctggtgaaatgttagtatcttttttgtattagaaggctttaatttatacatcagatatgtaaattgattgattcagggctaggcctatctggcagagcatgtgtcttatgtccatgtctgagtcctaggaggcccactactggctgctcttagggagtgtgctttggtgacctgttttgttcctactttatgagcccaaatctagatcatctgaaggaaaaggaaatgggatgaaaaagtcagttacagcctggaactaggagagttagaattttaaaaatcctctccaataccaatatgatctagccaagctggatttcaatttcaagacattgaaattgttaggatggttttaagcagatatcctttagcctttttatgaagattcaaagatttgactttctgtgtacggcttattaaatgtaaacatgtacacaacttaaagggaaaggggaatctttttatatagaactatgttgattcatgttttcctgggctttgaaaccctccctcttccttgatcagatgtgttcggtggattttaaacttcaaaaattgtagggatgggccttttgttataattggatactgttaatacagcgttcatgaggccattaaaaagattcctgagagcatgtgtgtaactgtgaatggcacgactcaaaaagacagtggcattttagaaactgaggtccatcaactataaatatacttttttaattgtaaaactgagactaataatgaaatcaagagtttataagttaagatacttcttttagcaagatgtgctttttaaagcattctagatgagaccaaagttttctttgaccttccatcttcccagagatcattttgccatttattcttccaaatcatataaatatgtgtatgtatgcatgcatgcatgcacgcgcatgcgcatgcacatgcacacacacacacacacacacatccatggaacagcaattttgcttttccataaatggttataggagaccagactacatcaattgatgctttattttaatatgatcatttgttctgctttgattttcctactcttgatatcactagtagcatttggcatctattatgaggtccctatgtactagggcaggaaacttagcatttttcatagagtttagtctgcataaaaaccttgagatgtggtaaaattccactttcaactttcattaccttgccatagtaatgcctgaagctttgcaccttaagactaaaacatttaggtttgttgttgttcgaaagaacatcttttagaagttgttaagacgagagcgtcttgttccttgtgtactatgacctttgtcaggtccgtggaatccagtgtatggtggactagcgaggctagaataggaaggctgagattcaggaatgaggaggcagcatgccttgttctatctagggaagagtacaaccctggacatttcctcagttgagaagcctgtgcctgtgattatatccttattttggaaacagttgtagggagtataaggccaatgtgaaggaagtttgcttctaaaggtcccttttgctgtgggccttagttgcattggtttgaggaaggtcttcgatgggaactctgaatggttagaggaactgttgggagggagtggtgtttgattggcaaaggaggaaagtgcttctgtgtagctggtttgggatagtttggttgaggatagttcaacattccatgaaaagaacttttagtgagtgggctagttgtcagaaatgtcgaactcccctctgctgtttaaccaacaacagactttgagaaagccttgttaaactgtgttaaccatgtgatagtaatattcatttcatgagtgaccatgagattacatgaatcattactaaaatctgtgcaacagagccagtagctggtggcattcttgtctggccattgcccaacttgtcaaggctttctgaagtgcctctgctgctgatagccccatgagaggactggtcctgcttgctttcatgctttgctactcagaaaagttactgtatggttccattatcctcagagtagaaaaagaagcatagttgttgtgtcttttaacaaattccaaacatcagttacatctcagagtttcttctggctgatggttaggaccatccacagtaacactcaacaggaggagaaagtatgtaagttccactgaacagcctcttgatgtttactcttcaagattaaaaaaaaaaacagtactgtttattgaaatgtgtcagtaaatctgttgtgatagaacactggaaaagtccagttgtcttgtttgtttgtttgttttgttataattattaacttgttttaaaatctctagtaatagtcaagagtggccggtggcttttgtgataatagatcagcacatgccctaaagtggtggtgagtgccaacatctggagaacaggcctgttcccactgccgatggagcttgcttgggttgcatgtgtgcagctcagggtccatattctaagtaaggatcagcaccctgggaaaagacgagcccccttggcttggctatgctcttgacattacatgtctgagagctggtactaaagaaattggcagttatttacaacacccaagaagcccatgtctccatctcacttgctactttgaatctcattgtgccattgtttggaaaagtatggatataagaaaaacctttgtgggccttgcaggaggcactttgctatggaaaaactcttttgattttatgcttactcttctggctagttgttgtgacactccttggtggtttgctttggcatgtccttattcacttttaggtttggtttgcctgcttttcatagcatatcatctatcctaaagttaaatcagtgataaaagtgccatcttctttcagagggtctgaggagttccatttggtatttaaggatgttcatttggaaacagccttttttttttcctatttttttgtctctactatctgaagaatgtgtgtttgtgcatattttgctcaattggtatcattttgttgcacctgtccctgtaaactgagcacttcctttttgccaagagcaggtacactgagaagagatgccagtgagctatctacaacctgctgggccatgacctgctgggccacatcttctttatcaaattatatagaatgtttaaacttttttagttaagctactctttaaaaaccatttataatcagctgaactgtcaagctggcttagaatattgaagaaacttttacataagagtatagaaaggatggaataaaaatgtctgatttgctagcatattatttattatggaaagaatgctttccccaaagacttactgggagcaagatgtttaactgtcagccagggaggaaacccttggtcagctttcaggttccatgtttctccacttgtgaggagcctgccagctctcccatcctccctccccacccactcttctcatttctcttggataaaggcagtgatactgtacatatgtggcagttagaattaaaggccaatgtctgttttctagaacagcatcatgtcaagtcattataaatttatgctctgctctgatgtatatggataaaatgccttctctttcctgtgtgctctgctcctggcttgtgtatgttcaggcagtaggactccatttatcacaggcggtaggaagaggctcaaagacatgaaagggttactgttcacatttcctgtgcagctccctctgatcttcctaagctgtaattccttcacaatattaaatgttcccaggctcctttaaccttctggcctgcttgcactggccaagtttgtcccaggtgattgtgtaggcgaacaacctcctgtttgaagagtagcaaatgctttctctgtgagacaggccatgctctctgctttacagtcccagaaggaatcctgtgatttaaacaacagaatagtaacatactcatttttnnnnnnnnnnnnnnnnnnnnnnnnnnnnnnnnnnnnnnnnnnnnnnnnnnnnnnnnnnnnnnnnnnnnnnnnnnnnnnnnnnnnnnnnnnnnnnnnnnnnnnnnnnnnnnnnnnnnnnnnnnnnnnnnnnnnnnnnnnnnnnnnnnnnnnnnnnnnnnnnnnnnnnnnnnnnnnnnnnnnnnnnnnnnnnnnnnnnnnnnnnnnnnnnnnnnnnnnnnnnnnnnnnnnnnnnnnnnnnnnnnnnnnnnnnnnnnnnnnnnnnnnnnnnnnnnnnnnnnnnnnnnnnnnnnnnnnnnnnnnnnnnnnnnnnnnnnnnnnnnnnnnnnnnnnnnnnnnnnnnnnnnnnnnnnnnnnnnnnnnnnnnnnnnnnnnnnnnnnnnnnnnnnnnnnnnnnnnnnnnnnnnnnnnnnnnnnnnnnnnnnnnnnnnnnnnnnnnnnnnnnnnnnnnnnnnnnnnnnnnnnnnnnnnnnnnnnnnnnnnnnnnnnnnnnnnnnnnnnnnnnnnnnnnnnnnnnnnnnnnnnnnnnnnnnnnnnnnnnnnnnnnnnnnnnnnnnnnnnnnnnnnnnnnnnnnnnnnnnnnnnnnnnnnnnnnnnnnnnnnnnnnnnnnnnnnnnnnnnnnnnnnnnnnnnnnnnnnnnnnnnnnnnnnnnnnnnnnnnnnnnnnnnnnnnnnnnnnnnnnnnnnnnnnnnnnnnnnnnnnnnnnnnnnnnnnnnnnnnnnnnnnnnnnnnnnnnnnnnnnnnnnnnnnnnnnnnnnnnnnnnnnnnnnnnnnttcttcttgagcttcatatggtctgtgaattgtatcttgggtatcttgaactgcagtttacacttctaccattgacaaatcaactgttgggtattctgagcaaacatctacttatcagtgagtgtataccatgtgtgttcttttgtgattgggttacctcactcaggatgatattttcaagttccatccatttgcctgtaagtttcatgaagtcattgctttcaatagctgagtagtattccattgtgtaaacgtacaatttctgtatccattcctctgttgagggacacctgggtattataaataaggctgctatgaacatagtggagcatgtgttcttattacatgttggagcatcttctgggtatatgcccaggagtggtatagctgggtcctccggtagtactatgtccaattttctgaggaaccaccagactgatttccagagtggttgtaccagcttgcaatccaaccaaccaacaatggaggtgttcctctttctccacatcctcgccagcatctgctgtcacctgagtttttgatcttagccattatgattggtgtgaggtagaatctcagggttgttttgatttgcatttccctcatgactaaggatgttgaactttactttaggtgcttcccggccattccagtttcctcagttgaaaattttgtttagctctgtaccccatttttaatagcactgtttggctctgtggagtctaacttcttgagttctttgtatatattggatattagccctctatcagatgtaggattggtaaagataaaactagtatctaacaagtgtgtttgttgtcaaattaactctgtccagattttgttctgctgatcctgatctaatgatgttgtgttttagatttgatattcttcttcttaaaaccactctagaaaaatgggttttaattctgaaggagcacatttggacttcccatcatacttttagccagttattcagtcagtcatctgaagttgtatcagattcaaagtggcaacacttctaatttttttaacagttcagaataatatgtacttcctactttttctctagtttaaaagtatacagcagcctattttgaaatcttatttttaaatacatgtgttattatggtcaacatgttttctatctttgcctttctatcttttactttagaagaattgtaatgccatgaagtctaaatgtgtccacaagacagcaagcacctgtgaccattctgtgactaggacatagttttcttgtcatactgactctcactgcttatagcaggtcttcgttctctttcagcattctggaaactgaggaattgaggacagaagttaaggcaaaggagtttgtaggatgatgccagtttgttgtcaccctggcaaagacagctacttacaatgtgacgaactgtttgtaataccccttactcacagtggtgcagttttatgtggaggaggctagctgagtttttagatttactgtgtttgcatcttcagtgaatcaataaggatgctcagtgtttctcatttgtctttagttctttggtgtaatatgaagcctcttacataatggatatgagtaaaaacttcttttgaatggtactataaattgccacttgtagatccttgatccataactgtatgcttatgtatgtttcttaatctgctgccctcgccatttctgttagcatcaactggtagctactattcagaatcctctttccatgaaacagttaactccatcccagcattctgtaccccaaattgttaggtggtctgtatcttacttgcctagtcgagatattgctctgtcacagaaaatacgttacttcacatacaacctataaacattgcccaggctatgagaaaattcaccattttcacagtagaaagcataaattcctcccaaggactaactgtttttagggaaaacattgaatagcaataccagtaaatcagcaggtattggctggatgctaatgtgagcattgtgcctcccaatgttggttctaaagatttcttagatctttcagtaactgatccagtccaaaggtaaccaacctaaagtaaattaggtctgattatgtgcaaagtgagaggctgaggctaggggaagtcatttgagctgagattagagagtggtgaaagatttgtagaggaaatgggaataggacatgaaacaaacagttgtggtctggatttaaagaagtgggaggtcatttatatgcagggggcagttactccctgctccactgtccagtagagacttttctccgctcggctacatacgttttgttcccttgcaatagattgcagagaagcctctgcccaggacatacaacagctcctttagctacccatcggattggttcagttcactgtctcctttctagttaaacatttcagcagaaaactaggaagaaatattgaagagttaatatttatgagtacagaaaggcacatctaacctcactagtaagatcaattgcatacagctgagtgaagtcttggtttgaatttgaagaggaaaaaaagtatttctaaattcactatttttgcatatatgtgtagctgaagtcattaaatataatttcctaggattttttttcacttctgaaaggttctttcatgaagcaattattatattagtctcacaaaatatttagtcctactttgtggttttgtaaaacaaatttagttttttaatttttttttctcttgaaacccttggtgcccagtgtatttaattttagcatcagactttgcagatggatgtttctgtcacttggccacaggaaaagcagcacagaaaccacactggactctcacactgaagacatacttggacaatctgcagctttggtttctagggtggctgcgagcagtgaggtcacatggcctttgcttacatctggatatccctattgtccaactgcatgtgttgctgccagtgagatgtgaaccacccacactgttttgtaaagatctggagtcttttcaagatattacatggtattccacaattaaagggtttgttagctaattttagggaatttgagagtaatcacagtgtacatttgtatttgttatagcccagtatttcctgtatttgagcttggacacacctactctacccttctaatttctttcctttcttctttaaaaattcgtattaaaatctcctgtagtgttggatttgaagtctctcacacacactgtatatatgcacacactgcacatgtatgcatatacacataatgtcattaaagtctgatgccatattgctctcaagaataagcagttagtggcaggttgaggtagtagaagataggttttttttttgtttgtttgtttggttggttagttggtgggttggtgggttttgttctttttactattaatatgtctgtttctatgttttttcctttagtataaactccttttgtaatcttaagaacaaaaaacaagaaaagttttacttacttaaaactttcataaatattagcccactctgtcatctggaaagtcactttgtttataaaatgctaagatttataaaggactgttttagaaatcattttgtcatatgcagtaaaggaaatctaatgaagttcctatctcatgctatgataccattgtatcctctacatgcaactttgtggctgctgtcaacatgctgtgctcttcgctgcttggatgttcatcagagggtatgggagttgtgtcttactgtgtctgtcttcccacctattacggtggttggaatccagcaggcactccttcagggtggaccacaggagagatacatctacagccattcctaagggaatatcttaatgctggtcgctgtcacatcatttggggatttttgtttgtttgtttggtcttatataacttactaaatttgtactttgacaaaattttatatgcatatagtatattatgattactgtcatccccagcttcccaaaatcctcataagtcttccacctctctcttcgagtacctttctgccattcatattgttttgttttgtgactcactgagtttaactggaatcagttgtactataggttagtattagggttctttaattgagcataacttacagagtgtacaccacacacacacacacacacacacacacacacacacaaacacacacaggatttattaaaatggcttacaggctctggtctagctagcccaacaatagatatctaccaatggaaggtccaaaaacccagtagttgtttagtccaggaatctgcatgtctcagctgagcttctgtatatctgataattccaaagaagtaggctctaataccagtgaaggaatggacctactagcaagagcaagcaggcaaagagaccaagcctccttctaccatattctttatatagactgctagcaaaaagtatcgcccagattgaaggtggatggatcttatccacttatcagtgagtgcataccatatatgttctcatagcctcttttaaattaattgttgttacctgcatatatatatatatatatatatatatatatatatatacacatatatatgcatatacatacatgcatatatacatatatatttctaaatataacctgctcagtatgttttcaggactgaccatttggtgttatataaccaaaaataattttaaaatatagcttaataagtttttattttgtatctgtcctaagaaaatattttaattgacaattataaatacacatgttatggtttagtaattctacacctttcttcaaatatcccattcatagatgcttttttctttcattgccttcgtgaaattttcttctaagattacaagtgaccattgagttcatctcagactgcttttttccatgatgatgagacagggcaggacacctcattcttttgcctttctttccttgtggaatctcatcctcagataataaactatttataagatgaacaaacactaactcagatcagtgagagcagtcacagagaccattctgaagttgacctttcaagtgtctgattgtggatgtctgttgatctggagttctagaacagcttctttaaggttatagttaatggctcaggttagaaagaaagtctattacagtccagattacctgtgtttgtcactgtgtaacaaagttggtggtagttccatttgtgtgtctggggtattgatggggtcactaatctagttcccactttgaaagacagcttttttttttttttttaggtttgtagaacataattttaatattttcaactgttaatagtcaacaaacagaataattattttaagatatatttcattgttatgtctccattttcatttctgattttattaatttggatactgtctcagtgccctctggttagttagatttatctatcttgttgattttctcaaagaaccagctactggtttttttgatcctttgtatagttctttttgtttctatttggttgatttcagccctgagtttgattatctcgtgctgtatactcccttcggtgtatttgcttctgtttgttctagagctatcaggtgtgctgtcaagttgctagtgtaagctctcttcggtttctttttgaaagcacttagagctatgagtttttctcttacaacttcttgtatcccataagttttggtatgatgcgtcttcattttcattaaattctaaaaagcctttaatttctttatttcttccttgaccaagttatcattgagtagagcattgttcagcttccatgtgtatgtgtgctttttttttggtatttaagaacagccttagtccttggtgatctgatagggtgcatgggattatttcagtcttcttgtatctgctgaggcctgttttgtgaccaattatatggtcaattttggagaaggtaccataagatgcagagaagaaggcatataatcttttgcttgatgatgaagtgttctgtaaatatctgttagatccatgtggttcataacttctgttagttttactgtctctctgtttagtttctgtttccatgatcagctaagagtggggcgctgaagtcacccactattattgtatgggatgtgatgtgtgctttgagctttagtaaagattctgttatgaatgtgggtgcccttgcatttggaaaatagatgttcaaaattgagagttcatcttggtagatttttcctttgaccaatatgaagtgtccttccttatcttttttgatgacttttggtggaaagttgactttattccatattagaatggctactccagcttgtttcttgggaccattttcttggaaaattgttttccagtcttttactctgaggtagtgtcagtctttgtcactgagatgcagttgctttatgcagcaatattctgggtcctgtttacatatccagtgtgttagtctatatatttttggaaaattgagtccattgatgttaagagatactaaggaaaagtgatttttgcttcctgttatttttgttgttagaggtggaattatgtttgtgtgactatcttaggtttgttgaaagattactttcttgcttttactagggtgtactttccctccttgtgttggtgttttccatcagttaccctttgtagggctggatatatggaaagatagtgtgtaaatttggttttgtcatggaatatcttggtttctcaatctatggtaattgagagttttactgggtatagtagcctgggctggcatttgtgttctgttaggatctgtatatcatctgcccaggatcttctggctttcatagtctctggtgagaagtctggtataattgtgataggtctgcctttatatgttacttgacctttttcccttattgtatttatactagctggttttgtgtcaacttgacacaagctggagttatcgcagagaaaggagcttcagttgagaaaatgccttcatgagattcagctgtaaggcattttctcaattagggatcaagggagcgatggccttttgctgttgataccatctctgggctggtagtgttgggttctataagatagcaagctgagcaagccagaggaagcaaaccagtaagtaacatccctccatggcctctgcatcagctcttgcttcctgatctgcttgagttccagtcctgacttcctttggtgatgaacagcagtgtggaagtgtaaactaaatataccctatcctccccaacttgcatcttggtcatgatgttttgtgcaggaatagaaaccctgactaagacagcttttagtattctttctttgcttagtgcatttagtgttttgattttttttgtgatgggaggaatttcttttctgatccagtctatttggagctctgtaggcttcttgtatgtttatggtcatctctttctttaggttagggaagttttcttctataattttgttgaagatatttactggccattcaagttgggtatcttcactctcttctatatacgtattatccttaggttttgtcttctcattgtgtcctggatttcctggacgttttgggttaggagattttttcattttgaattttctttgactgttgtgtcaatattttctatggaatcttctgcacctgagtttctctcttctatctcttgtattctgttggtgatgcttacatctatgactcctgatctctttcctaggttttctaactccagggttatctccctttgtgatttctttgtttctacttcaatttttagatcttggatgattttgttcatttcctttgcctgttgtttgattgtgttttcctgtaattctttcagggatttttgtgtttccttttgaagggtttctagctgtttacctatgttctcctgtatttcttaaagagagctatttatatccttcttaaagtcctctatcaccatcatgagaagtgattttagatccaaatcttgcttttcaagtgtgatggggtgcaggacttgctaggtttgggttctgatgatgccaagtaaccttggtttctgttgcttatgctcttatgcttgcctcccatcatctgattatgtctagtgttacctgctctcgctttatctgactggcacctgtcctggttgtggcagaactcctcagagttcagctgtctctgtgagtctgggatcctgagatcctgggcatgtcagagctcctgggagtcaggctgcctctgggaccctgagatcctggtgtgaccaagctcctgtgatcctgtggttctgggtatgttagagtgtctgcgggtggagcttcttctgggtgttgtgggactggctgtgggcttagcgcccaaggtctgctcaggccaccagtgcagacagaaaggaagctgtgaaggacatctttagtgaaggtttttttttttttttttaaatggtttacttctattgcaattgtgccaatttcttctcattttgactattgcagtatcagaagagattccctgcctatggactcctctcaaagcatctcacatgtattccattatttaaataatcaaattcatttagatagtgcatatttacatatgcatgtaaatgtagggtttttatgtgagtgcctgtatgcatatgtgtggaggcaaggagaagacatcacgtgttctgttatcacttttcaccttattcctttgagacaggctctcttattgaatctgtagcagccaataagcccaggttataggcacacatatatgcacttgtccagcttcttacatgagtacttggatgcaaacatgcatatgcagtacattttcttagcttctgagcaattttctccagtccaatacccatgcttttaaaatataaacttaaatgactcctgctgaaaacttttgtggcttactgtaggtataaattgaagcctcatgagctgcatctagtatctaattccttaaaaaaaacaatttagtatttaaatttttaatatgatctcagaccaaaattctctgttaatatcctatcagcctcccagtgtccatctctatcatcttcccagggtgaagaaccttcgcacactttttcatagtaattaactctaaagtcccagaaagtctcgtattatttgtaacatttaatggacctacctcagtgggatttttttcttgcttgtcttatttggagggctatgagtttcttgaaaacaggaactaatagtgtggtattcccatgttaaccaggacagtgactagagttcagatcttgtgtacctttgaaatactttttaaaaccaagtgaagtgaaataaatgaatgagaatattttattttaggttctttggatgcctagtataaaggatggcagttttatagtacttcatataatttttattacttttcaggtgcaatcatctaattagtttctgtaagctacctatcaattctttgtgttttaacacttctattatatttgctttcagataaagatggatgtcatgcattattcagtatggaagtttcagaagttagaagacatttgctaaatcaagttacttcacgtaagtcttagccccagctcaagactgagttaaaagcaaaaaataaaggtgactgacacctatgccattttgtgactctcacatgtctcaaagtacctggttctcttatatgtgaaatccttcttgggaaatggtacatcaataacttcttaaatccatcaggctatttttttttattacatgatacttgtgcgctttcgatttctgtggtggtttctgctaaaccagacttgctgcttcctctatcttaagtctcatatatatcaattttctgttgtagtaaaacatcataatgaagacaacttatgcaagaaagtgtgtactttgacttatggttccatagggttagagtccatgacagcaaggtagaagcaataggcaagcatgcaggctggaacagtgtcttagttagggttttactgctgtgaacagacactatgaccaaggcaagtcttataaaagaaaaaaacccaacatttaattggggctggcttacaggttcagaggttcagtccattatcatcaaggtgggagcatggcagcatccaggcaggcatggcacaggcggagctgagagttctacatcttcatccaaaggctgctagtggaagactgatttccaggcaactagggtgaggatctaaagcccgcacccacagtgacacacatactccaaccaggtcccacctattccaacaaggccacacctctaaattgtgccactccttggctcaagaatatacaaaccatcacaagcaggaagctgagagttcacacctttaccagaagcatgaatcaaagagagggagagagagagagcaagtgcatgagcatactgagaatggtgtgaagttttaaaacctcagagccccccacccccaactaactaccatatcatgtacaaccgtgaagttttagcttccagttggaagcactggatctttcttcttgttctctctgctgtttgtatcaaatgtttgttttcattcctgtgttttaccatgtgcttttttcttatttatatttgctctcctccatcctaggttataaggttacaagatcttgcctaatatttgtctcccctaacatttaacatagccttaatagtgtctagtaaaactcgattagcacactaagaatgtccttggccctctggtgttcattcttatggatgttgacccatgttcatggcagctagttatttttgttatgctctcctggctgtttccttagcttaggaaaatactgtgcaggtacagtcagccccaacttcgtaaatactctttatgaacccataaattcatgtctaatctgttgtttggaatgcagagggcattttacacacacacacacacacacacacacacacacacacacacacacacactcacaggacctgttagcagtggtgctctaactctaggcagctgccatgtgctgtgctattctgtggagaagctgtacctctgtgcctcgaaggctgtagagatgggtcaggaactttatgggctgagctggagctctggtagtcattctgactactcttcctttagtgcaacttggagactgtgtcatagacactgaactataggctcctgacactctaaaccagtgttatcaacctgtgggtcaatgctcctttgaggggtgttgagcaactctttcacagaggttgcatatcatacatcctacatagtagatacttacatcatgattcgtaacagtagcaaaatcatagttatgaagtagcaatgaaataactttatggttggaagtcaccgcaacctatataaagagtcacagcattaggaacgttaagagtcactgctctgaactgagcgagaagtactctggctctctggtcctccccacggtgattagaatgggctcagcttacatgagagggccgttttaagcaggtgtagaaagatgaagagctgtttcactatccctttctgctcatctatacagcataacacatatgcatgggaaatatataaacatggaaatctatctatagtgaaaacacattaatagctatcacacttatactttacatcacatcactctttgtgaacaagtgattatcatttctacattgatatagcaatgcttctagtgaagaaaaacatgtcactgtgtgcataaacagtcttgaggttgacagcttaggttgtcagactgaaaaatcacttcataaatttaagagaatttaatttattcagtgttaatttaattcattaagtgttacgcacacgagtacctggcttatgcttaatactattgtcaaagctagaggttagggaacaaaagaatgaacaaaagatgctagagaaggtttatcttccccaggggcctgaaatcaaggctcaaggtgttaaagaagcaccctcagtgaaacagtgtcattgccataacagattttatcaagaaatgagaggagttaggatgctcagaatggcaatcccattgaggttcccatgtttctaaagacagtggcagattcctctggctttcagaggaatcggggagctctaaggagagttagggaagacataactaaggggatagttggcctgaatagagaatagcagctgacaccactgtctgggacagaagagttagcttctgttggggagattaattgggaaaatagcttaagagcttcagtcttggcagttcgtgagtgtcacccagatttcataaagctccaagtctcagaatcttacctcagaactgttaaataagttccctactagttttgatattcagctaaggtagaaaactcctagatttgaagtattggccaaactcaggagatccatcaatgccctgccaaggagctgggtctctctgtccctctggcagtggggagttaaccctcagaggttttttcagtggttagcatgatcaagttagagtttaccaaaatcagttgattattcaagtacatctgaatggaagagaagtaagaaaaagcttgacttagactttgtggtggtctgagaaaaggagaggattcacactggaaagtatacttggatatatgggagttggtgatatcacccttgaccccaatacagtttgtttcataaaccgattatacagcctcactcttgttaatttgatctccggcaacttcagcagtaatttcagccagtttgcatttaataaaaggagaccgttacatgtacatgtctaactcataatattaagtgaggttatgtgtatgaggaatatgaccttcaacgtagtcattataaagcatttaataaccttccacatatgcagtaacacagcctttgtcctgcaggatcacttcagaggtcagagttacatgtataagtagttgttggcatactgttctccagcagtaagttgaaatttgaagcagtgttctaagtcatgctatgcattttaatggtttttttagttagttaaattgggtaatcagttacttttctgatgacagatctgtgtttgattcccaaccttaacacctatcctcctcatgcatatgcttccctccctgcacatgtgtgtgcttagtgcagcccctctagctaatcacttgcttgtgtcagtcacaaacgccccgggtccatccttgtgcaagggtatatgtgagcagaagagtgggttcttaccgaaaccagaagttcaggtctcttgggtccttagcagatctggtattgactcttgctgtggcctcatagctgctttagtacacccacattcagtgttccccagactgtcctatggtagaacatttctgtgctctttgttttttattgtttaccttaaagactgtgagcagatgagagtaaatccaaggcatgaagttttgatgtgattcccccttctttataaaggttcagcatgggtgctaatgaggtgactcagtggggaagtgcttccctggggagcatgaggacctgagtgtggatctccagcacccaagtaaatatgagccgcctgtcatttcagtgtgtgagaggcagagaggggattccctagcaagctggctagctcgtggtctcaaacagagaatatatgttcaagaacgagaccctacctcagtgaacagtgaagagtgatcacggaagacctctgcctctgcatgtgctactgggagctttctgactgttaacgagtttatttatgtttcatcaatattgccatactttttgagttgcttctgtaatagatatttaggttctcacttgacagttgacttactgggatctgatagagagggaggaaatgcggcagaatgtttttttatccagggcccaatcagtgcagttcgtatgggttttgtcatagaactcaatttcccaaacaaggaaatgggatttctgaaacacagagtcaaggcaacaacagaaactagttttggttacaggttaatctgtctgaatagcctggtcttataactttatgattttacctataagggaatataatgtaagggactgacttagaatccagagagttgagcaaggctttactctgtcactaacaagcttgaggatgttctgtaaaactccctcaaaccctatctgtcaccctgtatcgtctgtactgtgctgtatttattgaccaacttgggtgttgtgagaagaatgagctaaggagagtcacgagggctttagagggaggaaaagcattagcagtttgagagaattttaattcaagcaggaaaataaatgactaaaaccaaacaaaaatagaagaaaaatactaatgaatgcatacattaagatgatttgagagtctgggaaagtagctcagtcagtatggtgcttgctatgtaaacctgagccctaaccctgaggacaggggagacaggaaaatccctgtgcttacagataggccagtctagcctaattagcaagactaaggttcactgagcattgagagatcctatctcaaaaataatagcagccaccacaaccacaacaaacaagatagacagctcctaagcaacaatatctgatgttaccctgtagcattacactgtacaaacacacatgtgcacactcacagagagagagagagagagagagagggagagagagagagagagagaatttatgtagattttatggaattttatttttattagtgctacaaactttccaaaactagtgttggttaatattgcatgttcccagcattagtgaaccagaatatattgctatgcttttaccactctctggtcagagtgtatcttgacagttcattccgtatttcttgccatttgtcagaagcaccattagcacccatgccacattaactaggtctgaattctggtatctgctcattgccagtgaggatagtaaggttctaagtcgcagtatgatatactggagtagaggtgatgtcctcagtctctgaactgctgtgcctgaaatttgaaggttcagaacagagtcaacttttgtaactgttttcacaaaattgctttcaagaatgtttttaggtttctgggaaactttaatgatttacaggatagaatacactgaaagatagttacagctgttctaatccattcatgctcttttcaggtatacatgaaagaggtgagaaatttggggcacccattacattgtaagggcagtgttaggaatggaatggtagtgatcctgagacatgccaaggtcatgcctgagacttaaacaaaacctgtacctgattaagattcagtctccatttgggtactgggctagtttaagctacctttaaaaataaagggaactcagttgttcatataactttggtttccacaggtacatctggcttcagatatggttgaaaccaggaacttaaatgatctcatctggactctttcagctctattggttgctttacagtttttcagacaggattccactaaccgctcaagattgtcattctttgaatttagcaacataaacagaaagatagcttgcaggtcatatttcctgctgtctaccccagtatcctgtgtatgactcttccaaaagtcaaggttacctgggaaggacatacactagtagggcagcctggctcatgttccccagtgactacgaaccatgctgaatctcacagcatggaagggaccaaaggactttcttccctagaaaatctgaactacagaaaattagacaatgtggagattagaaacagtaggaccaagtgatttctctctatttgaaacatgttacacacacacacacacacacacacacacacacacacacacacacatagtgttgcacacaaaggattctgaaaagaagaaataagagatgtttaacatcattaaccagatggaaatatccaaaagagacaacaggctttacaattgatttacctgttttcatgacaggaatttgaagtaggaaagcctgggttcgttcattctcgttctctctctctctctctctctctctctctctctctctctctctctctctctctcacacacacacacacacacacacacacacacacannnnnnnnnnnnnnnnnnnnctctctctctctttctctctctctctctcttcctctctctccctccctccctctctctctccttctcccccatctctctctctttctgtctctctctctctctctctctctctcaatctctctctctctctctctctctctctctctctctctctctctctctttctcacacacacacacacacacacacacacacacacacagtccagtcattatccccttcccagtctgtcctctgacagttcctcattccattcctcctcccccagtctcaaagagactcatccataccttcacccctccaggcctccccaggtcctggggcctcaatgtctcttgagggttagatgcaacttctcttactgaggccagagcaggcagtcctctgctgcatatgtgtcaggggcctcttatcagctagtgtatgctgcctggttggtgactcagtgtctgagagatctcaggggtccaggttagttcagactgctggtcttcctgtggggtcggcctcctccacaacttccaaccctttccctagttcaaccacaggggtcaccaacttctgtccatttgtagggtgtaagtatctgcatctgtctcggtcagctacttgttgggcctcacagaggacagccatgctaggctcctgtctgtaagtacaacataacatcagtaatagtcccttgagctggacccctttgagatgggctggtcacctcctttcccttagtctcttctccatttttgtccctgaagttcttttagacatgaacaattccgggtcagagttttctctccacttgatgccctgtctttctactggacgttgacactaaaagttcccactctccactgttgcgcatttcatctaaggtttctccctttgagttttgagagtctcttacctcccaggtctctggtgcattctggagggtccccccaccttccttcccgaggtttccattcattctgagtgaagcctggagggttcccatctcctaagtgtggtccacccacagtaccatagaaaataaaatgaaactaaaaatatgttttgacccatatgtatataatgctaaataattactttaacaacacgacttcataaaatattggctttattttcttcttaagttttactggtctatctgggtcctttcagcaaaatcttgctagtgtacgcaatggtgtcagcgtttggaagctgattatgggatggatccccggatatggcagtctctagatggtccatcctttcgtcacagctccaaactttgtctctgtaactccttccatgagtgttttgcttccaattctaagaaggggcaaagtgtccacactttggtcttcgttcttcttgagtttcatgtgttttgcaaattgtatcttatatcttgggtatcctaagtttctgggctaatatccacttatcagtgagtacatattgtgtgagtttctttgtgattgggttacctcactcaggatgatgccctccaggtccatccatttgcctaggaatttcataaattcattctttttaatagctgagtagtactccattgtgtaaatgtaccacattttctgtatccattcctctgttgaggggcatctgggttctttcctgcttctggctattataaataaggctgctatgaacatagtagagcatgtgtccttcttactggttggaacatcttctggatatatgcccaggagaggtattgctggatcctctggtagtactatgtccaattttctgaggaaccgccggactgatttccagagtggttgtacaagcttgcaatcccaccaacagtggaggagtgttcctctttctccacatccttgccagcatctgctgtcacctgaagttttgatcttagccattctgactggtgtgaggtagaatctcagggttgttttgatttgcatttccctgatgattaaggatgctgaacattttttctggtgcttctctgccattctgtattcctcaggtaagaattttttgtttagctctgagccccattttttaatggggttatttgattttctggagtctaccttcttgagttctttatatatattggatattagtcccctatctgatttaggataggtaaagatcctttcccaatctgttggtagtctttttgtcttattgacggtgtcttttgccttgcagaagctttgcaactttatgaggtcccatttatcgattctcaatcttacagcacaagccattgctgttctattcaggaattttttccctgtacccatatcttccaggcttttccctactttctcctctataagtttcagtgtctctgattttatgtggagttccttaatccacttagatttgaccttagtacatggagataggaatggatctgtctcttgtgagactatgccggggcctagcaaacacagaagtggatgctcacagtcagctattggatggaccacagggcccccaatggaggagctagataaagtacccaaggagctaaaggggtctgcaatcctatagatggaacaacaatatcaactaaccagtacccctcagagctcgtgtctctagctgcatatgaatcagaaaatggcctagtcggccatcagtggaaagagaggcccattagtcgtgcaaactttatatgcctcagtacaggggaacgacagggccaagaagtgggagtgggtcggtgggggagtgtgtggggaagcgtgtggggtcttttgggatagcattggaaatgtaaatgaaataaatacccaattaaaaaaaataaaaataatttactggttataaggcttgaaaaagttactttcttctaaagattaaagaagattgaaattaatagttttccctcaaatttcaggtacttaatactattaggattcaattaatgtgatttttgactatgtaatgtgattctttcatatttaaaattcaaataacattctaaattttaggactttttggtgtaactggcccgttagggctacagaagtatggagattgtgaagtgcgctgtaactggtttcctcttaggaatcatgactcagcttcatgagatagaaggtagacatctttcagtgactaaaaagacttaatgacttactatactatagggacacagaaacaatgcagaaaagttatttcagactgacaggatgtttgcttgtcaattttttttaaattgtgctgagttggatttgttgagaacacagagcaaccagttgctctaatataggttcccaggctctgacattttataggttattttatagttttctcttggttctgtgatatcaattaattagattagattttaaattagaatttagaactacaaatatcccttagtcttcttataaatgaaggagctgaaatcctaagaagcctcaattatctgtgattttgcagccagtgatgaggccaaaaagaagcaggccctcctggctgtcagtttagtgattgctgtagaagatcacttcaggtttattttctccagagtcgttttatatgcaggacctgttgtcaaattacaagtttgtgtttaatctcttgaagttgaggggcttttgggattagaaccagatagtccacagagcatagatggcaggaagcatgatgagccatccttgatcagactccagttgtgtcctctaagaagaactgggcctcagttctgccttcttgaagatcttcctgcctattgttatctaagatcatgcttatgtggacattgggggtgtgtgctttattgtgctgagctctgctttcaaaggactttgacagcacctttcacagtgtcaccatggcaggtagtgtttgaaaacacgctctgacatacacatcacagcccacctttctgtcttctttactctgcccatctttgcctatttgagcaatttccattcattcatccatatctgaagctcttgaaagatactgtcatggtttgattttgcttggcccagggagtggcattatttgaaggtgtggtcttgttgcagtagttgtgtcactgtgggtgtgggttttaagaccctcatcctagctgcttggaagtcagtattctcctagcaaccttcagacgaagatgtagaactctcagctcctcctgcaccatgccggcctggatgttgccatgtttccaacttgatgataatggactgaacctctgaacctgtaagccagccccaattaaatgtccttataagagttgccttggtcatggtatcccttcacagcagaaaaaccctaagtcagatattgggggtgttgttgttttgcttgtttgcttgtttgtttgtttttgcattttgagttttggtatcagtagttgctgtaataaatagcttccaaaatgtacaagagcttaaacacaattcagatttactacattcatttactgctagtaaaactttattagaggcattcctagttaatggcggcctttgacaatgggcctttggtctttccagcactgaaggaaaacaagaaagacctcctctgtgcctgaaaaaaatctctacttagagattgacatccagatacttcactcaagtatttttgtgggagtaccattcacagagctgcatctggtactgaagagagattataatgcagtgtctagttttatagccactttttagtaacagctttaacactatgccaggggaaggagacatatgggtaggataatatagtttttattctactttaatagcaataccatattgtactcttcatcttagtgtaactactttccctttgtattatccatttgatagtttctagattaacatttcagtatataaaactcaaacaaaatagtattgccatctctatggtagaaatagtcagactccaaaggccttatttatccatattccctgatgaaattaaaatgagttgtgggcataaaaaaagaaagaaaaatatgtctaatttttatttttattcagtcttctacgaaaggatctgtccagaaaaaccaagtcaagatgagggaaagagactaaaagatgtaccaatgtattagtcaggttctctagagtcacagaacatgtagaatatatataattcacacacgtatatggaatttattggaatgatttacagactgcagttcaactagctcaatagtggccagctgtaaatagaagtaagaatctagagatgctcagccccatgaggctgggtgtttgagctggtctcctgatgaggtaggtccaacagatgtgttggcaggtaagtgcaagcaggtgaagaagagcctgggttaaagatgtgtgtttccagcctcaggatctggatcacagagtgccctccatttctggattgtagttcattccagatatagtcaggttgacagccaagcatagccatcacaagaagtgagaagaaaaataaatgccattatgagcatatgatataagttgcctataataaaataaacaacaacaataaaaaaaacctttcagaattccacaagtacattattagcatgaactggtaaatttggcagggtttttgataaaaagcccgccagtagaagggcaccagctacactttgcagaccggtggcaacagagccaaaactacaacatgagtagaatgcagctgtatgtgagactacctctgattgcttccatttttctacagtaagcacagtacttacttctatttcagagtctcacattgtatctagtgttcatctcttcagtttgttctgttgtgtgcagtttctctttttcctttgctttggagacttgagatttttcaagtgttcatgtgttctatagaatgggcctcaactggaatttgtcaaatgttttctcaggattatattactgtagatcagaggtaaagtatatcaacatgacttattagtggtggagttaaatttggtttcttgaataaggtggcctctgccaggtttctggcagtgagagaatgacagtggatcctattggtggggagtacgtttcatcttccagtagatgtcagtctgaagctgcagataatgctgaactcaggaataaccatgtttttactttatgtgccaatgaaaaagtttaattatgttaggtatagtaaaacaaattcttaatgataaaaattaacaaaaatgtgaatatggcctctccttgacccagtatcatttttgtttgtgcttttgcaagtcttggttctttgctctgcacatgatgtctgatcttgctatgtaccacagcactaccacatggttctagggctcatctgtccctccatgtcctgtgccctgtgtccatgcagtcttatgactgtgttatgtgctgctgcttccatcaggagtctgcatttgtcccagctaagcgcctgctttggctcctgtcttattgacttagaatcagctgcttaaactgccacaaatgtgctgcaacttcttgagtggcttcccacagaaatttccatggttataatccacacttgtccctgaatctagatgctgacccttactctcagtactttggtgtcactccttcaatgtgatccctgcttgaatcttcatgaggctcagtctttctggtgcatctcacctggactacctcatgtttgtcttattcctacacagctgctctcttcttagctgagtactcaaacactgtagctcatcttttgcagtttccagttcttaggtgcagcagcaaagctggcacatttttctttcttttcttttcattttttttttaaatgcttaaagagaaggctttattgtaagtatgagagagagaatagccagaggcatctggaagattccagagcaaggaggccaagtagtggactgaacatggccagcagacctgagctgggaggaagnnnnnnnnnnnnnnnnnnnnnnnnnnnnnnnnnnnnnnnnnnnnnnnnnnnnnnnnnnnnnnnnnnnnnnnnnnnnnnnnnnnnnnnnnnnnnnnnnnnnnnnnnnnnnnnnnnnnnnnnnnnnnnnnnnnnnnnnnnnnnnnnnnnnnnnnnnnnnnnnnnnnnnnnnnnnnnnnnnnnnnnnnnnnnnnnnnnnnnnnnnnnnnnnnnnnnnnnnnnnnnnnnnnnnnnnnnnnnnnnnnngggttacttggatctgtgatcctaagcagtggatcggttgagaagggtgtgtctggccagcagccaggcaagatttgcagtgtgcatatgctgtgcaggggaaaatccatcctgatgtacagtgccagagtatacaattgaaaacttaagatgtgcttagttttggaaaataccatttaatatttttatttcatggtcaagtttaggtaattaaaactgtagaaggcaaaactagagattgagagcaaggaaagtgctaaaaggtataattttaaagtatacacgttacatagcagcacaatataattgacttaaatgaaaaattagaacttttctttgaaaaggtacaaactttggttgagtgtaaaggaagcccttaagtaaacggattaaaaaggtgatgaagatatagctcagtggccagagttcatgcttagcgtacacaaagccttgggttcagtcttcatactacataaaccacgctaggtggtccagccctgtgatcccagcagctgggaggtgcaagtagaaggatcaggagttcaaggtcattctcacttacatagcaaattcaaggtcagcctggcttatgtgagaccttcttaacaaataaaatgtagaaaaggaagacttaccttggggaaaatgttaattattttcaatgctcttaaaattaaattcctaaccggtttggggagattttgtccttactattaatatcttagtagaataaaatgctattatgtttttagtttttattttaatgatttagtttaattttgacattataattttggccttaggaaagagataaccttcaaaaattgtgaatgtgtccctatagggcttgcaccctgtatcaaagatctgtttttctacctttgtatcatgacttaatataaaaccaaagtagttgaaactatctatggtataagaatgtaaaaaaattaccagtttaaaaaagaaagagaattgataagtagactcatttctatgtggagacttggtttataagtaaaacagtttattataaatcaatgggagaaaggatggacagtttgcattgctgggggcaaaatgttgtccatatgaaagagaatgaggtggtatttgctatacatacctggggatcttaaaattataatttagtttagacacagttaaatttaatcggaacacaagaaattataaattaagcacaactcaggaaagacagggaatcagaaacacacttgccaaacaaacgagaacacactggaaggatcacagaagcaaacaggcagcctgaggggagtgagtaagtaaggttccagagccacccgaggtctgggccctgagcacagcttcgcatgtagtgcactgttggtagtgcactgctgtgagcatttctcatgctgctgacttgtatggacgaaagggaaaggcttagggattctttacggaaaggtccattgccctgtgaaaagcactaaagtcattcaacttgccaaggtatttgccatctgcagaatcttcagaaaggcttagctaagattcataaaatgacacacttcatcttattactttctatataagaggcatcctatatataatccaatattaagcatagaagaggtgaaaaggaatattattgatttaaatatatatttcctaatagtttttagagaatttttaaagtagtgcgtgtgtgtcacattcttgtacctataaatgtagatcgttggtttacagaaaatgtcttttatttaatttaattagcaaggctagtcttcatttgtaaattaatcttacaaaccaaacatctttcagtaaaagtccacttgattttataactcaaatgtgttaatgtatgccaccatgacaaccatcacatgcctgaattctaattctaatagaaataaatagggcacagagctacacaatgtgttgcctagataccataaggtactattcctgcagcctttcttcctctgtgttcaggaagctagctcatgtagatgctgtttaacagtaagtaatacactgtggaaaaggtagctgtgtaagtgagcagtaagctcacgtactgctctgttttatgatagaatacattacatgtgccctaaaactctttatttcttaacaggatatatatgaggctggtaaagaccagcaccttgctacatttcttgataaaaggtacattgttaggtaccattattttaccccctccctttttatagcaccctggaagattctacatcttaagaagtaaataaaataggtccatcatatatggaattaatggtacaacaaaactcacaaactggtgaaattaagccaacttttacatattaactttttttgagataaaaagacagagtgaatctaaatattgaaaaaacccagtaaaggtgctggacctcggaggcaaaggcaattactcaggggaacttaggcaagtgctttgagatattgaaaaataagaaaggtatgttggccacgtatgtcattaaacgcacacaaatgaagaattttaagattttttttgagaaaagttaactgtgcgcatcaatgtagtctctcaagtgtaagtcagcaagtttttttaagtttaaaggaattcttacgccttctttgagccaacactagaaaaaaaaaagacttgtaaacacagatttcttttttttgtttgtttttttaaaaaaattttttttagatattttcttcatttacaattcaaatgctataccgaaagtcccttattaccacccccacccccgccctgctccccaacccacccactcccccttcctggccctggcattcccctgtattggggcatataatcttctgcaagaccaagggccttgcaaaagattatacatagatttcaagataaagatttgatatagcaaggacacatggtcttagtgctaaaagtttttatcacttacatggaccattggtggatgacattggctcttttgattaatgcttcttatgacagaactgacctgtttctgaggtcttggccattctccagaaagcagaaaggtcagtacttctcagcagtctcaagcatctaaacaagttacttgaggaacaaacccataaatattagttgtttgtacataggctttatctccagatgaagtgattttcataccaatcctgatgaagtcttaggcagaggttttgtttgaaaccataaaggttgttgccatcattttgcccaataaacataaactttgtgtttttctgtgtagaacaagttaaatttgttaaaaatcttattatattcttgagtttgaaaaatcctaaaacccctttgtgttggtcagaagaatggaatatagcacaccatgacactgaaacataactacataggtgttgagctgcagtgcagtgtggtgcctgttccctctggagaagtctctcaagaacaagtctctttttccacttgaattcatcaaggttctgactggctttacccagccattcctgctcctcccctttgtggctgatgacaatagggaggaagataaaatctgtagtgagtttgtcctagagcatctatagtcattgctattagcatggcagccagggtaaaggtcagagcaggcatgaaataaacccctcagcttcctaactccaaggtgccaactcatgcacagagcagttggactctgagtaaaaagagcagtattaaatattaaatgcctgagaggagagtgcattatcatagataggaaaagtggtccaaaaaaaaaaagcctctagatatctaaaacaagacagattgagaattaaacagaagacctcaaaggtgtttgtttttctctgtgtccttgatcaagctaagtaagtgtgaattgggcaaactttctctacctgacttttgtgtctctagatcttgctgaaatgttttagataaaatatcttcataaaatatacaagcaactaaaaaaaagcattatatatgaggaagctcatcttttattagtgactcagtgggagaaataggaacttgaaatttctagattacctgtccttgtaaggtggacagatggaagcaggatagagacagtcgaagctggccagtagcagaaaaagtctgagttctgtcagcactggactctgctgaggcactaaaattcaagacatttcctgttatgtttgtgagcacataagtcaaaggtggttgtgatgctctgtttttaattacatagaatttttacttgtgtatggatgttttgcttgtatgtgtgtctgtgtagcctatgcgatatccatggaggccagaagaaggcatcacatccctgggactggagttacagacagttgtgaattaccatgtgggtgctgggacctaactccaggtcctataatagagtagctagtgctcttacgtgctaagccatcttttcagccctgatgctgatttctttaaaaagtggcatggattgcataagttggaccttggattaaatatattataaaataattgccataatatcttgataggatcaaaatcacaaagcataaaaaagatggatcagtacttgagtgcttgctgatcttacagaatacttaggattggttgctagcgtacttgtcaggcaacttacaggtatctgaaactccagttctcttttctgacttgtgcataggtatgtacacatatgtacatactcacacacaccaattgaaaaacaatttaaagatattcacatgaataggaaattaatgcttagtgatggaaggaaacaatggtctattgtagaagtcctttcataggaagcggacaggagtggaatacaccttgataaaacagaaaggcttcaggaagagagcagatctgatgaagaagagtgtgaaggaaggtcaaagcaaagcctgctcagaagaccttgcagaggaaaaccacaagagaagccagcaaaaggcaatcaaaggtcagagacaaggggagcagagcaggattgtttgacgccaccctgggctacacaaagcaagacctgtcttgataagttaaaatgaatggggtaaagacagggctgtggaggagatagtaaaagaaaggagagggggagcaaaggaaggggaagaagggactgacagccctgagtagaagatggtataacggccgggcagtggtggcacacgcctttaatcccagcacttgggaggcagaggcaggccgatttctgagttcaaggtcagcctggtctacagagtgagttccaggacagccagggctacacagagaaactcagcacagagaaactctgtctcaaaaatctaaaaaaaaatgaagaagaagaagaaggaggagaaggaggagaaggaggagaaggaggagaaggaaagaagaagaagaagaaggaggaggaggaggaggaggaggaagnnnnnnnnnnnnnnnnnnnnaagaagaagaagaagaaggagaaggagaagaagaagaagaaaaggaggaggaggaggaggaggaggaggaggaaggaggaaggaagaagaggaggtggtggtaaatcaggaaagctaaatcagaaagctctgacaggctaaaagtggagcattgtaactgttttatagtcatcactgactacttcccgctttgatctgtctgaaattccctgttcatgactgggcagaagtttacctagaagactcagctgcagagcaactaggcagtgtgagtcccttgcctcaaggatggatgacactgcagctcttgcctaccctacctgaacagtatctattctgtagtgtacaaagaaattgagagcagtttacataagccacctgattccattaacaacatgggcttgttagatattatctgttcattccttttactgccaggtttagagtcagtgttccatttttgaaatgagctattaaaatagcttctgagtttgatgtgttaggcatttccagggagactatgacacagcagtcctgagagacacacttttgaagtatgatgattaggaatacgtgctttccttattttcagtaaaatagagtatttagaaatatgtttaatacaaatcatacaagatctgtattgttaaaacagcaaatcaaaactaagaagtcaaacatctgaataagtgaagagaccttttgttcatttcatttcatgatatttcccccaaacttatcccttaattctgtccaatcttcatcatcttcacacagctgtttttgttttgatttattttttatttttttgtagcgaatcaattctaaaagttatatggacatatgaaagaagaatatcctacagtcttaaaaacacatacatacatgtagacagacatacgtacaaaccattcttttaatttaaaggacttatgtcagtattttactttttataagtaatctagcattctactggaaggaggctgagtaataagtttctccttgcaggtatctagtaagatgcccgtatgggtatgaagtatttgagtatacacaagtacagtcaccaagccttattgctccatttatcacaggaaggaccagatttctgcaatatttgaagaaaagttgttctacttgtatggattctcatgggagtgaccacaggcattgtggcaatttaataccaagcatttaagttggggttctaaatgacatgtaatagtatgatttatctgctgtcttgagctttgtaggacactaaataagattccatccttacatattgctttttatttttagagttagagtgatgataaaaaatctaagcttacgaactgtcaaatggtttatgacatttcatttatttttcaaaggattggaatgtcaccagtgagcccattagaattgtatgcttaaagcactacgagttttaaaaagaccagctgcataaacaagtgtgcacactttgtaatttaattctgaggtgttttttttttttttttaacacttcaaagtgccaaagaagtcagcttttcttaggtcataagtagttgtctgaatcattctgatctcagaccttcaagctcatttcaagatgtcctctctaaaatactaggactttattgtgttcagtacaacctaaagatatctgtctatcctgtgtatcctttctccatgagctgataccaatatggaataaggagaaattgaaactacctatgaaaagagtcaagtcagtggccaggagtataacactttttttttttttggtttttgtttttttgagacagggtttctctgtgtagccctggctgtcctggaactcactttgtagaccaggctggcctcagactcagaaatccgcctgcctctgcctcccaagtgctgggattaaaggcatgcaccaccacgcccggctagtataacacctttgagaattccttgtattagttttgtttccattatatggttaaaaaaaaaaaaaaggaaggaaggaaggaaggaaggaaggaaggaaggaaggaaggaagaaagaaagaaagaaagaaagaaagaaagaaagaaagaaagaagaaaataacttaaaggaaagggtttattttagctacaaatctaggttacagtccattattgcattattgtatgcagcaagaagcagctggtcacatttactgtcacaagcaaagagaaaatgcctgtgtgcatgcttacaagtgatcatctccctctctccttcattcagaaaatgaatgtggtaccagccacattcttagtgggtcttcccatctcaattaacataatcaagataatatcctcacacatagctatagattaacctgatctaggcaaccctcattgatactcttcccaagttattctaaactatgacaaattgacaaccaaaactgctatcatagtggggaaatacttttgactttaaagtttaaaggactgtatactatctgttggtttgtctgtcatttattttttattttgaagttccagctatgaaatctaggacgttatacatgctaaacaatttttctatccctacccatgaagctgtttttcactgatagatttatatttgagataattataaatgtacatgaactttcaataagtaatctatatgacatacactctccttggttttcccttagtggttctcaacatgtgggttatgaccccttttaggggaaggtcaaatggcactttaacaggggtcacatagcagatattctgcatattagaaattgacattacaattcactacagtagggaaattacagctataaaatagcaacaaaataattttagggttgggagtcaccacagtatgagtaactatattaaagggtacagtatcatgaaggttaagaaccattgctcttaactctgaaacagtcttcatatgtatcagatttctttaattcttaaattcatatgtgtgtatgcacatgtgcatatgctcactcatgtaatttttatttgtcatatagctttttgtaactatgttcaaagatggtttccataacagagattcttcaagttgcccttttatagccatgtttgcctagtctctcacaggtatgcctatccataagccctgccaatcactggtatcttctctatgttcacagtatttttatttcaggattgtgtaagtggatttttaagtgagtaacctcttggtatgcgttcatttagtgtaattcacttgagagttttcaaagttgttacatgtatcaatagttcattccttttcattactgagtaatagtctgtgaatatatacatatatatacatatatatgttacatataatatatgacaaaataatgtaaaacatcactttaaaagtaccaaaggcattatgttgtttaacctgccttgttaattaagagtacagagtagttttgacatgcgagtcacttcagttaggtttgtctgtgtctgagcatcctaagaacaggtgagtcagtgttggtatcccattttcagtgggaaaggggaacatctttcttcacacttattcattcaaataaaaacctgcagggatgggagtaccaggtagcttccttctgattgtctaaaatttattatttgtattttcccctgtgtacagcttgtgatcactcagctagctcttcgtatggctcagtgttccccatgtggacctcttatgtatgtgcccatgttttggtttctcatcaagatggacgagtattttcttgaattctgtctgactgcaatactacttctcccctccttcccttgctctgctttcctagggaggaaaggaaatctgaaactgtaagaactgactaggaagtgggcagtttgaactcaagaagaggtgagggaagatacagggatgaaagggagaacaagaaaagccacaggaattggatggggccagttgttactgtatggtttagaaaggaagagagacaccagtgttccctgatgtcagacagtgaatgggagagataggttttaaatccaagattcctgtatgcaaggcccctgctgggcatgtaggcttagaggtgggagctcagaaaagaggtgtctggactggagattaagaataccaatgtctggcttttaagctgtcattgtggtaaataaagctataaatgggtaagactccctagggagcaggtgtacagtgaggcctgatgtttacttagaggaaaatctgcagtctccctcatatacagtaagaagcaagcagcactggaaggttggaagcagttgtcatttgaggctaagaggtcaagtaagatagagaccaagcaggccctgtggatgatgttggcaaaggccatcttggaaaatgggcaagatgtcaagaggaggcaagaacatgaataagagcacttaggcagtgctgcacagaagtttatttgcgatagggaatatttaagcaagccagtgggctgcagatgtagggagttacgaggccacatgatattactggtgttgttacagaagagacttggatttgttaagttaatgcagaagcttgtgcttaaggcaacaatgcggtttccttattgttgaggaaaacaagggccaggaaatggagcctgagcttagggcctggcctcagggaggaggaggatcagcattctgtgtatcaggacagaccaggcagtactcagtacttccgtaggcttccccttgagcaattcatatttctctagaaaggaaagagaaatggctcagatagaggagtgtgtagtacaggagattggaggaacaaggaggataaagtttagacaaatttagtgtttttagaacaagcagagtagtgggcttcacgccgctccatgggcctcatggttgtacccattttccagaggatgagcttagtgttaagacacagtggatccctttcagtatgtgtttattaccactgggggtgggaattgtagatgacaaagaaggaaatagagagcatgccagtgccatgtgtgatagtttaaatgagaatggtctccataggctcatttgctttagttgtggatcccagattggtagaactgtttgggaaggattcagaggtgtgtcactgtattctggttttgaggtttcagaagattcatgacacattgaattagtctccatcattatctctgtccctccttctttccttccctccccctcccctccctccctgtttctccttcctttctcttctgccttctacttgtgttttgagatgagagctcttagcttttgctccagcttgtgagcctgctgccacactctcctctacaatagtggtagactcttatccctcagaaactgtacaccccacataaatcctttcttcgatacattgccttgatcatggtatcttatagaaccaatagaaaagtagctaagagagaagttggtatcaggaatggagtattgctgtaatagacttaaccgtgtggggttttggttgttttattttgttttaagaatgtaaaaaggctgaatgtgagcatccacttctgtgtttgctaggccccggcatagtctcacaagagacagctacatctgggtcctttcgataaaatcttgatagtgtatgcaatggtgtcagcgtttggatgctgattatggtggaacaacattatgaactaaccagtaccccggagctcttgactctagctgcatatgtatcaaaagatggcctagtcggccatcactggaaagagaggcccattggacacgcaaactttatatgccccagtacaggggaacgccagggccaaaaagggggagtgggtgggtaggggagtgggggtgggtgggtatggggggactttttggatagcattggaaatgtaaatgagctaaatacctaataaaaaatggaaaaaaaaaagaatgtaaaaaggctttggaacttgggacttgaaaagaaattgagcactgtaagcagaacttaatgcaatatcctagtaggagcttggaaccaggtcagaaggattcagaaggaaataattttaacaactgggatagggctcattcttgtgagattctggaaaagaatgtctctgctcctgccctcttcctaagaacttgcctgcggctaaatttaaaggtaattgtctcatttctttcaaggaaatttcaagatggcctaatatttgttttgttgcatggttattagtaatcattattgtgcaggtctacaatgtaaaacagcaaatggatcaaaacaaaatacaaaatgtaggctacaaggaaatttagacttggagccaagacttgtaccaaaggagataagattataatgatacctttctcaactgggccatctcactgatcctgctgtcatactcagaacagacacttgcaatggttgatgttgacttctctttagttttagagtcttctggagctgaagagatggctcagtgtaataagagcagttgctgctctttcaatgtctcatgttcagctcctagcatctacattggatagctcacagatcttctggcatgtatatacacttagatatgcattgcatacacataatttttaaagaaattttctgacacttttatgtgtatcttgtacttgttttaaaagactttttttcaaaagcagcactcttcaaagaacttgtacaggagcaagcctttacaagcagaacaaacaggcatatgtatctcctctttagagaagtgttcgggaaagggcaaggcacttaggacacttttatttggtcaggattttttttttaactaaacataatttaaagttggacctcttctttataaccagataagagaactactttcccttagccgattgcaagctttatttaggataaccaagagtacctgtcataattgaaatattatgagcatgcatgtatatgtgtgtttccttcttgagacagtgttgatgtgcagccaagactggctgggagcttgcagcagatcttcttactcctatttccctagtgctgggattataggctggtgtgcacctgggattaattatgtacatgtacatatatgtatgtgtgtgtgtatatattatgtgtgtgtgtgtatgtatatatatatatatatatatatgtatatatatatatatatatatatgtctgtcagtgttggaagtcaccacacatgcatccctcagagcctttcatcttctgttttctcatttttattatattgattgattggtgaaggtaggtgcacatgagatatcctaaatcactttttatggtgatcctcttgaatattttctgttctacaatatatcaaattttggtttttattttttgaaagaagaatgcttattataatagcttaaattttaactatttaacctgaaattgtcttacaataaagagaatttaattaggaacgggagtattactatataaaatataaaacaaagagagatgaaaacattttgttttcactagttttgtgactaacactgaggtaaaggggtaatagattgctagagatatagtctttgccaacataaaagggaagactgtgtttaaagctacagttctcaaaggggagtggggtttcagttctttaaacaatgtccttttctgctccctctgcaagatgctgtcttcaccaaccatgcagccccattgctttttgtgtctgggaagatttgacagtgttgcacccttctgctatgtctgctcagctgtaacttaagaggcctatcattccctggaggactagggaatccttggcatttgtcaaagtgtagtacccttgtctcctaagtaccagcaagcactctttcccctccttccccattaatctgaatagcctgcatttttcctttagcaaatcttgcttcctccaatctatgacctctttaagtgcactcttctgttgttcttgactctttcttccatcctcactcctacaactgctcattgtcagaagacatgctgttttcttcattcagcttcatagacatggatggagcacagagagccttggaccttatttctcaagggctctatggtgacacccattgcactccagtccacaggaactaacaagattcatagcaagacaaaccgaaactcagtttaccttgtaagacctatatattagtgatgaaggtagttgaaaattttcattacatctctacatatacccttcttttgtggagactttgctgtatgcttctcaaaattgtaagagggcacagtatatgagttaaaagcatgttctagattcaagcctgttcttggtaactaccatgtgtgcgtaagtcacgattgcttttcaatacaggacaggtaattcagatgaaatatatatgatttccttttatacaaatattttattagatattttctttatttaattttcaaatgttaccccctttccttagttcccctccgaaaaccccacatcccctcctccctcatccttcttcttgagcttcatctggtctgtgaattgtatcttgggtattctgagcttttgggctaatatccgcttatcagtgaatacatatcatgtgtattcttttgtgattgagttacctcactcaggatgatattttctagttccatccatttgcctaagaatttcatgaattcattgtttttaatagctgtgtagtactgcattgtgtaaatgtaccacattttctgtacccattcctctattgagggacatctgggttctttacagcttctggctattataaataagactgctatgaacatagtggagcatgttttaaaacaatcttaagcaggacgatatgttatactttttttacatcatatcaaaataaaaggttcctggggcaagagagatggctcagtgtttaagggcactagctgtctggtataggaccaagtttgattcctagtatcttcatttggcagctatataactgcctatataactccaacactagggcatacaatgcctctgacttcccatggtacatgtactcatgtgcatatacccacacatagaaacatacttgaaaagacaggatagctccccccccccccgagatagggtatctctgtgtagctccatagaccagcctggtctcaaacccagagatctgtctgtctctgatttccaagtgctgggattaaaggcatgaaccaccaccacctgactagaataggcattttatggttataaaaatggctgatgaaaattatatgcttctgtatgcatgtgtccatcttttatcaaagcaggttagttaaaaatcatgagttagtcagtgctatcaatgaccacacaaagcaagtgtggggacttctgtggctcagagaggaagtattttcagttgtgtgtctctgaggtctgctgtctctcatgattcctgcgactaaaacaacataaaggatatctacaaaatttccccaaacttctgctgagcactgaaactgaattatctaattttcatgtatactaggatagtcttttacgtttcctcctaccctagtaattcagaaatgtaaaatcccgagtttcaggccagcctagcttatacaaaacattctgagttagtcagggagacatagtgaaaagctatctgaagagagaaagaaaaaagaagaaagaaagaaagaaagaaagaaagaaaaaaagaaagagaaacccaaacaaacaaacaacctcatattcttagtttgcgaggctcacaacaggcctaatagtgtgatatcctatgtcaacggcttagtacatacaactgatttgtaacaacttagtacagaagttctcaatttgtgtgacccttttggggttcacatatcagatattctacatttaagatatttatattacagttcatatcagtaataaaaatacagttatgaagtagcagtgaaataattttttgattgggagtcaccactacatgcaactgcattaaagagtcatagcattaggaaagttgagaaccattgacttagtagctatgtaatcttctctttaatgctatcttaaccccaagccaacaaaggaggaaatctgctactaccactaggagggaactaagcaatcacgcatagggaagagtaagctatactagtaacgtaataactgaagcagaaaaataacatgaatatgaacttaaatataacaagcagtattctcagcatgtgttagtttaattttcattatagccattggatggttatttttatgatccctatctaacatatgaagaaatctaagctcacacagtgagtaaatggacaggtaccatgttttgtcctgacaggtacattgtttccatcatctgttattttcttataaagtttccatttcatgtgacaattttcagaaattaaaatgtacataaattaaacaatgtgatacacttcatgtttaatagtaaacagctatgctttactctctggacagtcaaagaaactgaagggttccgatagagatgactggtattctcagggaaagactgggcgccaaggccgtattccttcctgtgtgctaatcactggaatacatattggagagaaagccccaggaaaagggtagcaaagaggcaggtcatttttgctgtctcagaatgacttctgagctttctgacttaaatttcctcccagccttgctgtgtacagagagcatttacacgcctacagtgtttgtctccctcactggtctgctagcagtaaggctgttcacagtcacagcatagtgaacctaactgtgttggtttcatgatgttctcatttctaccactttgttggctctgaggactgctgttccaaatccaataatgtgcagaataatggattctttagtgggcataggaaaaaagttggagttattaaaattacttaaatacctaaaatttatttcaccatagtgttaaattgcaaaaatggcctttagaagttataatgaaagactgtaacttccaaataacttcagaataaaaacagtgaagaacttgacatttgaggactttggctagccaaggaaataagaaatggctaaaagtgaacttattccaaagagctgtcagtggaaggcagctatgtgccagacaattacttcagagtctgccttcattacttaaagaaccatgaggaaatatgcatgacagatgatctccacagcactgagcgaagggcatgagacaggaaggttcttacaggacaggacttgggcaaaattaatctgccaatattataaaacgtatttgccaaatttccttaaacttgtacttttccaaaaatccttgctctcagtaaactgcacaattctctatgtgtgactagcacagtaagaaaataatacttctcagcagaaggcaagcagccatgtttcctgaggtggttcaaacaatgagtgttacaagggaaattttctggctgaaaattgtactccaatattttcattttcaaaagcccatatctcagagctgtgtctcactctccctcaccttccctgccttgaagctcattaaattgtattggttctgtctccaaaaagcccttctgatgtccatgtttcctcttctccactgcgaacctcctggcacaagttgcatcatctgactagaaaactggacactcttagtcttctctgggttttcctggtctgctcctgactttcttcagcctatactccttcctcgagtctgtaccgcaggtacaccagccttcccaagtttcctgagcatgacagtgctatctcagtaggatttttatatatgttgacttgctccctgtaatgacaaaattcccaaggcagtcatcttaatggaggatttactttactcatggtctctaaggtttcagatgatatttagccaggtaactatggacctgtagtgagggagtccattttgtgataggaagaatagcagaggagtctgctctcctaatggtggcggagaagcaaatggagagacagacaagggatgggagcctcacaacaaactaacttccttccactaggctccaaaaggttctcctgcttctcactagtgctacagactggccaacaaacatcgatacatgagcctttaggatgctcttaagcttcaaaccataaaaaaagttctcaaggcaaaatcatccagacccagattggttcagatagcccttcatacatgcagcaagccctgtagctttctctcacattgctgtggttttatttacatactgcctagtacctaacagagaagctttagtgggctcacatgcctttgtgataagcacctatcagaacaacagaaagctcaaaaggagctgggtcagtaactgtgatacaacgtctcaaagtcttctgctgggttatagggtaccaacctacttattacaaattctcctttaaactattcaacatacaatcagaatgggcatgctccacacagtcactggccaggctacagggtatgccatgctcaaccttctgaagaactgccatgtttgttgacacttcccaagtaatcctcacccgcagtatacgaagtttccaggggctatacatttccgccaatacttgtttctattttcttctttatcacatggtatctcattatgattattctgaatgactagtgacatcaagtgtcttttcatgttctcactggcaatgtgtaaatctaagaaaataaaaagtatatttatgtatccatatttaattgcgttatttttttattgttgaatgtaaaagttctgcaacaagtatgggcatgagccttttaccagagatatgatttgcaaatatctcttccataccctggcttgtcattttagccttgaacatttttaattttggagaaacccaacttaccaaagtttaggttgccaactgtgctttgagtgtcaatctgacaaattattctgcataactcaaagttataaagatgttaacccctgatttcctgtgagggtttttcatattgtttaccttttatcttcacatattttgataacttctatatgtactacaggggtcccttttgttttgtttgttgttctcagagcactgtttgagagccaccctacccctattgatttgtctggacaccattactaaaatacagcatagcaaaatgtcagggtgccttctattctacgcatgtgtctatccttattgtagtactgtgctgccttctttattacaacttatatttaagtcatgacactaagaaggatgaactaatattctccaccacacgacaactttgctgactctaagtcccaaagatcatattgttaatacatgcagtatgaggaagttctggtcgcatggagcttactctgaatatgtagtttagtatgtgcaggactgtcatgctaatagtgttaagttttccaacttaagaatttggagtctttccttatttaaatctttaactcccaaattacttcaacatttggtgtttcaaatgttgaacttttgttaaacttactcttgcttagatgctactataaatgttgctttgctaatatattttcagattactcacaattaatacgtaaaaatgcgattggtatttataatgattttgtttctttcagccttgaaaattttatttagtataaccatttttttcttaacatgtttctttttttttattttcctcatttacatttccaatgttatcccaaaatcccccataccctccccatacttcatttaatatactaatactttgttgaatacttttgcatttatatccacagcagtatttgtttagttttcttgttaaagtgatactgagcctcacagaataatctggagtggtctctgggaatctcccccaacctggcgcatcaagtttctacagtgttagatgtatcctctcccactgaggccaaactaggcagccttgattccacagactgacaacagctttagggacagctcctgctctaattgttgtagcaagaggttggtaagcttacttgcctaattttcctttactgcccatcagagtcatctttctctggccttagctctaatctctgtccttgtgcatttataagcccattgtggtctggctatctacacaatttcagtactggagaattcacacataaaacatgtctccatgccagaccaagaggcttcttttcctacctgaagctcagtcccaatgctggtaaggtgctaggaacctgatgtagcaagacatcattgagcttacatgttgaacctggtacatcttgtcttgccaatacataaagcaacttgattcttagaagcttaggtataggagctggggagatggttcattggataaaagtacttaacataaaagtatgtttggatccctagaactcatataaaggtagacctagtgacgtgggtaaataatcctagcactcctatggcagaatgaggtgtggagataggagaatgcccagaggattgtgagccaactagcctgtcgtacacagtgtcaaagagatccagtctcaagcaaagtgaaggtgaggcctggcatccaaagttgttctccgatcgatctccacacacccactacaccacattcatgcacagtcaccctacacctcacacatgaaaagaatattaaaaaaaaaacctcaatcacagaaataagctatcagaatactagtgtgtttcctttctctcttatctttctattaagtttaaataaatagtaatgatgactataagcaaatctttagcacacagatgacatcaggaagtagtaatgattgtctctgggaggcagtaattatgacagataagactcttgattcagtattccatccaatggcatttgaaggtttgcctcttaaaattttgtaacagatataacatttttacaaaaaaaaaaagtccagaggcgccaagttcattacatcagcctttccaattgagccttatggaaatgaaaattccatgttttatgtgttggtttttgttctactaggcctctgtcaaaccattttgctctaggcatgaatgagctaatctcatttgagaagatgtgttcattagcaaaattgtaccaaaataaatttcactaaggtcatagtgtttaatttaatagtattatgataataactaccataattagtttcagatttgccttctttcccaaaggacaagaatttttgtgctctcggatgtacatttaaggcataaaaatgacagcaaaattaatgtcatggccttcaaagcctgtttatgggttttccttgcaggtccctaaaggacttagggagcattgtacagctaaaataaaccacttaggatgtgcaagataaaattgggttaattgggttcacctgatcctcagctaggctacacctcagtcaatgcagcattcttattactcaaggaagcatgatttttataactagaaaactactccagaactacacaaaaagacttaaagtatactttcttcaaataaaatataagatttttttcattcattgctttaatctagtttgtttttatttagaaaatcactttgtcttttttatattcatagcaagaatgttctggtgctatcagggcagtcctcttgaacactaataaccattccttttagggatgtgaggatcacaatgtcctacaactgatgttctataggcattcttctaagccttgggctctgagccctgcttttcattttttatcagggtttgtgtatcaacaaaagaactgtttacatccagctaaaatccagagaaacaggaagatgaaaatgttgtgtctgacaattccatatataatatactttggtcattatcaaccccatatcttctctctctttttcctcacctgatgaaacccttcttcagaacaagtatccatgttttttttgtgtgtttatgaagcactggatttacttagggttgtttgaatgagcatgggttggagattatttactggaacatgaaaaacctactggtagctgtaccatgaagaaaatcacatatacccctaggagctgttaactgacagtagtccctctagaggggtagggagggcctatgagtccctgctgcatccttagtgcaatgctgacaggcctcctcttgttcaggtcttttgcagacaaccacagtttctcttagtgcatgagtacaacagcccaattatgtccagaagatactgcttttcagtacccttacccctcctcctcctcctcctcctcctccttcttcttcttttttggttttggttctgtttgtttgtttgtttgtttgttttgagacagggtttctctgtgtagccctggctgtcctggaactcactttgtagaccaggctggccttgaactcagaaatctgcctgcctctgcctcccaagtgctgggattaaagttatgtgccaccaccacccggctgcccttccccatccttacattccttctactccctcttcatgatgagctccaagccttgggaggggctggtaaagattacacatttttgaacagaacagtctacagtcacttattcttagcaccttaattggttatgagtcttaacgttgagaacaatactaatctatagatataaacatagatgtttataaggtgccttggcaacataagtgtctggcagaacaacaatagtaaattcttttctgggctctgtgaactgagccatgggcctttctttgatcagctctataatatcaggtgtgtattccctcctgtggcccagcctccattccaatcagaagaaattggttgcacctgtaaccattgagccaaatcttgcctattacatcactattatagtttacatgatttacggtattatgtgagattgttaccttcagtcctccagcatcctacatagcaccttctaggactataaatgatgggtctcagggaagaggtttccaggtcagctgtagtttgatatcactttaccctgtaattgaagtgtgatgttttagttctggtgggcagtaaaaagcactgtcaataacctagattggtttatgggcctctggggccttcctaatcagcttatatggaggtatcccatgcctgacactggaaatttttatttagtaccctatggctttccataggttatccacctaaagagactacctctattatgtcttttacaattatatttttaataagcttacaaactagtatgttttcatgtggctttttcatacaggttagttttggttaatccttctccctacccctcttctctactctctccaccacaatttctacttacatccttcaacttcgagttagactactacttttacatcaatatgtcttctagtattaattccttcctaaaggcctcttccccctgccctgtttctgtttctttggattctgcaaacactccaagttaaaaatacactaatctaagaatttaagctaggatatgagagacagtttgtgaatttatctttatgggtctggattatctcattcaatataatgctttctatttccattcattctgctacacattttgcaatttaacttttctttagctgaataagatttgttgtacacacacacaccttcatttttattgtccatcatcagtcgacaaacatctagtctggttctattacttgactattgaatagagcatcaattgcatttgactacacttagtgtgtgtgcacatggaggccagaagtcaacaaccactgtcttcttcagttgctcagatttgcttctgccagatctgtgtgggactagaaagtgaatcagatcctttgagtttcctcccaagactaatacttaaaaatgtcaagaatgaatactatttgtttaaaacagaatcttgctacatagtccaggctggtttcaaacttataatcctcctgcctcaacctcttacatataagaatgtgtcatcatgattggcaaagtgtgtgtgtatgtgtatgtgtgtgtgtgtgtatgtaatgaaatattcaagaactgaaatacccagggtttcaagttgaaaaggtccaccaaacattggacagatgggtgaaaacatgttgagatacttcagtgcaaatttttctaacattggtcaggaatggcacacctttagtagcagcccttgaaaaagcagaggcaggaagacctgtatgagttccaggtcagcttggtatacatagtgagttctatcccagccagagatacaatcatgagaatcctgtctcaaaaaaaaaatcttaacataatttctgcacagaaataaattgtatgcaaagcatttaaatcttcagtatctttgtattgatattgccaaccagaggagaatatagcttttgagttttggctagaagtctatacctagaaattactattacttatcatttttattgagagatcgtgacttttcattcttagaaagacagcagtagatattacctaagactgaggactaaaattataaatgtgtagtcaacacatgtggatatatggatacctgaatgctgatcataaacgctttaagttctaagaattgaaagtgcttgtctctgaggaaaagagcctggtgtctgtatctttaaaacaaaatagagatatttgatgtaaatttgacttaaaagttttaattaaaaagggaaaccattataatggcagaaatggcttcaaaaccttgcaagactgtctatgtaagaacacaggcatggacagatcttacaactgaaaccctgatgtttaccttttaagtatatcctactattttttaaacaacgaaatagagcacccccactttgactagacagttgattatagagttagagattatgttacccctaagtgctcctttacccaaaagatagaaaaccatttgtgggcacagagattgaacacccactatattacatttatttttgataacccaaagctggtgaatgcccagtagatagaatcctgtcactagactcaagagctctggtgaacaatgttgactgggcagagtggttgcctgtggagttactacctattgtagcatcaaatctgtttgactatcactgtgttgtattttagaatccacagacatgagataacagaaccaaacatggaagaacttctgtcagaaagtcaggctaggtctgtggcatatgtcaccgtgtaaagaagagcctgggcacagtggtacatgcttgtaaccccatcagtgacacagttgaggagaaggatcataagtttgaggtcagcctagactatagaacaagctcctgtctaaaacaacaaggttgggggtagcccaaaggcagagtacatacctaacatgaacaaagccctcagttcagtccccagcatccggacctatgccctctcaaaagtttcctgtttttataccagtatttagtattttcacatttcaagatgtactggtcaaatttattatgacatttattctgatgacaacatgtctgtcttgggatgcatggcatgtttagtccctaagtcttctggaaatgctaatctagatggacagctacactgaatcttgtggtcagtgcccatacaaacacatgagagcatggcacactctctaagcatagactaatggcagcaagctctgaggaaatgcacagagatggtctcttctctctgagactcttgatctaaacttacttttaggaaacttggcaaggcaatgtagggaattccagcagtgcccatagactgtcaataagaaggaatcaagttttcactttctcaagtcaccaatttacctgatattatgtcagataaacttatcaacttatttatcaagtctttttaaatactatatagtcactaaaatcaaagttagttatatgtgtgatttattaagcttattatgataaattttgctgtaactggtggtttcactgatttgtttctgatagttttctacataaatatacttttcactttttcaagtttttcaaaaagccagatcataatttttgtcgatctttttataccttgaaggaagccctggaagctagtgccttgccatggtgcccctaatgcatagaacttcactttgtgtaaggtttaaaaactacagtcagcgatagggttgcagatctctttagctccttggatactttctctagctcccattggctcttgactctagctgcatatgtatcaaaagatggcctagtcggccatcactggaaagagaggcccattggtcaggcaaactttatatgccccagtacaggggaacgccagggccaaaaaatgggaatgggtgggtaggggagttgggggggagggtgtgggggacttttgggatagcatggaaatgtaattgaggaaaatacgtaattaaaaaaaaaaaaaactacagtcaggtattatattattgtttaatgcctccctctttgcctctgatatatttatataatgagctctcatcctctctaaattgctacattatactatgattattcagtattttctttgttagtatactaactatataatgtattaatttttcaattaaaatgaatgaaatccagcttcatttgacacagcacccaactgcagccgcgagtttcccactataggaccaacgtgcacagagtctgtttaaagttgttctaaagaccctaaaaatagataccaggctttcctgacaagaacaaagatttgtacaaaatgggacttcaaaatacactcttaagttctagtgaccaaaacagctttctttgtattttcatgacatacaacagagatgaggactgctgagaaacagccctaccagttttcaaaacactgttttctaaggttagggctttggagttagagttgggaaaaataatgaatgaataagtaaatgaatactaaagatcataatgtttcatttaggaatcttattgttcttttttaagttttagacttgggtatatggtgcatacttattttgtgagctgattcaaaatctctcattgttattttgcaaatgggtgtccactggtccatcatggctgaagttactgtccccagcagttctacatagtagtggctaggatggctctccttttctcagttgtgaaagctttccataatttaccataacattactgttaagattctcataggtattctttaccaaggtgactgtcctttctaatcttcattttcattttttattttattttttattaattaattcctaaagttcttaccaaacgtggatttatatcatatcatatgtattttctgtacctattaatattattgcatagttttcttttttagtttattaatatatgaatgacattgattttgaatgttgaaccaagtacgtattgctaaggctaccctgactgcttacagtgtatcatattgttagatttgattagttaaatcttgtttgttacttctgcatgtgtgctcatgccagaataataatctagtttcttttctcataaagtcgttgtctatcttcagtgtctagatactgctcagttcttaaatagtaagaaaaaacttatttttagttttctttgtgtgttgtttgtatatacaggtacacgtgtatgtgcatgtggaggctagaggttgaaatcaggtgtcttttccattgcttttctatgacagagtctctctctcatttgacctggagctccatgtaggctgctatacatactagccagcaagctcccatgcgcccagtgataggatcacaggcatgtacagtcatgccaagttttatgtgggtgatggggatccaatctcaggtcttgatgcttgcacagcaaacactctaccatctgagccattgctcatggctatcttttcagtttttgagaatgtgagtatggttggagtaatttcttccttaatgactcaagagcatttagggaatgttgtctgggcctggcatttctgtgagggacataaggattctagactgcaggttgtctctctctctctctccgttcttcatgcatggtgttttcttacttgcattgtttctaataaggcatctcttgctattcttaacacatttctctctgtagcaataacattactctccagatgcctttccctttttcttcttttcacttgttttgagtaggttggtcatgatagtctttgctatgatcttcatcatttttgtatattgcagggttttaagtgcttagatctgtatgtttacagttttgtcatggtatttgggctaataccatctttctcctgtccagctattgacatgagctttttatttgtcctacagctcagttcgtgatgctttatattttctgtattttgattttacttaactccccattctgggtttcattttgggtagtgtctattgttctgccttaaaatttgctagtatattcttccaacaccccttattaacagatgaaataaatacctcatattcttatctattatttctaacatctgggtgacttttcttattttctttattatggatcatattttatagcttctttgcatgctgaagaattgtaaggaaggagaaacacagtggaggaactcttcctccatttccctgagatcagacccctgcttcctgcatagagttaggcaactccctgctgtgctttccactctgtttgggatccattgctgtggattttgtttgtttgtttgtctgtttgtgttttgttattgttttaaagatttgtttttattttatgtgcatggatattttgcctacagtatgtctgcttaccactcacatttctggggcctgtagaggccagacatggagcatcaggtcctctggaactggagttacagttgtgagctgccacattgggcaatggatccaacccaaatcctctgtgagactaagcagtgttgcagccctttaagccattgctccagccttgctggagtctttttgatgaactgctttctgttgtctaaaagggttctgttacctattttatctttacttttagttgtttatgtagaaggacagttgtggcctctgctactctgttttttaaaaaaaaaaagtgtacctttttttaaaactcagtgtccattttttaaaatgtggaaagtttcatcagtcttgaccttaactgtttttgttgttgatgtttcctagaaaaacatctgtacttaaaaagcttataaaaatattgattaatattttttaaaagagcttgtctttttttttttacacaaacacagatacctttccatatctgcatttcacatcctcaaaataagtttttggcccaggtggtggtacatgcctttaattacagcgcttgaaaaagacagaggcaggcctatttctgcaagatcaagtccagcctggtctacatagtaatttccagaccatgcatccatgactatgtagtgaagcctgcctcaaaataatagtgataatggtggtggtgatgatggtaaatttgatttgttttgttttttagacaagttatcatatagcccaggctgctttgaatttgtcatctctctgcttccagctccaagtgctagtatttataggcatgtactaccatgtcttgcttcaaaaatatttttaagctccatctatagctaagcatgttgctcatacttggggcgggggttgaagaaaaactattactgtgagttccagtccatgctgggctcaaataaattaactttacaagactctttcacctacaaatgtgtttaaccacattcatggctgtcttgggaaacatgcagtcataggcctcaggttggatacacctatatatggctgtttatttatataacatttacattgtacccaagtattggagtaacctagaaattatttgaaatatatataatttaaaatatatatatttgcagattatatgcaaatagcacaccaggtatccctaacttctggtctctcaggagtatcaagctccatgaatactgaggaccagctgttactggataatgtgtagacaacttggaaacttggtaacctgaaagggaaaacttggagttccatgaccgagcacagtgcagacacaagtgtgaatttgccaccgtgtgttttcctgtatgactacaggactggcatctgccttttagtatgatagtatcagcatttcatatgctccttcacaggattcttactcatattttatattgataagactatattctgttaagtgactatgttagagttgtgttatccttatagcttacaatttacattttaatgtttattttcatactataattatcagtatttctaatttattttggtaattattttttaaacgagatatatgaaatatagttatcaggcagacgttttcagagacactttacttgcttgcttctatgtgactgagagcaagggtacaggtaggccctcaaaaagcatcccagtttccctgctcaagtccactccagcgtattttccattcacttaggagggaatcagttttcaaaagcttgtataattcatacttttctgtgtattagcaaaatatctcaactatttcctaatgattctttgtgcttgaatattttaggaaagctactcttcgggtcatatacatcataatgcggaattcttcatcagtaccaccaaaagatcaaggtaagacagtgcatcccacagaagacagcactgtacacattgcaatataatgattttagttgatatatttaatgcctccaccctccagtcataaggtgtcatagttcctagaattaaacgcaaaacctccaattacatctaaaagttcatttccttttgtaaactcatctagtgattatggattcccaggttggcagaacattatacagatctgtctcctttcctaggctgaaaggccccaaaagcaggccaagtcattgtgtgcagagctgggaggccggctcaccactgccagttagctggaggtagtagatatcactgcgattatggatgtggcttcactggcataatgactcgggtatcttatgaagttttacattcatgcctcatacatatttatattcacacacacaaggacacatatgttaagaggtaatgtttgcttatatttttacctgttgttttcttataccattcaaaatgaaatttgaaagaaaaaataatttctttatgaaacctatcaaaacatatattaattatctcttttgatattataaaataattacaccattttccctttcctttcttccctcaaaactctccaataaacccctcctagatgtctttcaacctcatggcttcttttttcattaattgtcattatatgcatataagtcttaaatataacctctgcctctatgatattatttgtatgtgtgaatcgaggactggccatttggtattagataattcacccacttccatggggaaaaaaaaaaaaaacagtttctcctacacaaagcattccttagttgacacctcatggtctttccctcatctactttagcatctctcttgttgtccttgaccagctcatgtttaggaagtcatggtagtgagatgttttaagcgtagcttctgatattactaggagatacggtctgacaacaaacttccttctaacccccttcgtaaacaatgctctacaatttactaaaattctatgatgttccctgagccttaggtgcaggaatgttttgtagatccattggaacaggtctccacaacttgcattttgattggaggtagttttctgaagtgggttttatctgtctgaagtgtccttgatgaggaatggaaacttcatttatctgtgggtggtaagtcaactgttcagattgttgccacagattgtaccgggttagtaaagtactagttataggctctctctagtacccatgacttcactaagtagtttgccaggttctctcttgctaaacagatcttgtctaatttgagacctgtggaatactgcctaggtatgtgtgccctactgtgcctgtaaggttattgtgacatgttggccactggagtggttcataagtgtcctagctatggaggactgttgattgcttccctcctttggaagctttctgataccataaaagctaggcctcagggaggggcattcagggcagtcccagctttgggcctcagggccctgtttctgaagtgcttgatatcttcagcaattgagaattgccttctacctctgggtgtggcaaccaaaggtaatagcaataaaatgtgtgattgaggggtctcttgaacaaccctggccaacactcaaaaaaaaaatgcatctcgtgtatgttattagggtttttgttaggcgacctttgaattctggaaggagcattgtcagccttgaagaataaagttcattaaaacttcatatgtatatttatataaagaattacatgtattatagggtttattaaataagtatttaatagtatgagttcttatgattttttcagacattcttataatttttctgattaaaatgaacatgtgatttttgtctttaagtatattatttagtttattacatttatagacttgtatttgtggaaacacccctgcattttgtggataaagccagcttagtcattgtatataatgtttttgatagatgtctgtattctgttagcatttattgagactatgttcaccactaacattgtcattttcatcttttgtttgtgtctttacctagttttagtattcgagtgataccagctatatacacggagtttggggatgctcctgtaactggtttttgttgttgtttgtttgtttgtttgtttttcttgtttttaatagtttgagaaggactgactgcagcttttccttgaaaatctggtagcttctgctgtgactccttatagtccttggatttacgtagctggaagacttcattactatttccgcctccctcctcctttgttatgggtgtgcttaggtgttgacttctttggtggttttgctgaatctagaaaaccatccatttcttttagcagcttaatggagcacagcttaatagagcacagggttttaaaatattctgagtctctttggtgtctgttgtatttccttgctcatctctgattttgtctctttcttttggttagttgggccaagagtctgctaatcttttgtttatcttcacaaagaacgagatctgacaggattcactgattctttgtattactttgtttctatttcattaatttctgctctgatttttattatttcctgctgtctactgggattggatttggtctgttcttgttttttcaaaattttgagttgcgtcatcaagccatttacttgtgctctttttgatattttttaaatgtatgcatttagagctaaaaatttcctcatgggactgctttcattggtattgcttttcatagatgatgacatgtaggcagggtcaatttatttatttatttatttatttatttatttattgagaccatgttgtctactctgaaattaactcaggtttggcctacctctgcccataccatacatagattataccatgattaactttttaacagaagtttctagagtgttcagagaaacattataagtagaaatagactccataataaagattaattacaccatccttttataaaaaataaattgacataaagaaggaatacaaacttttttttccttgcttagtcaatacagaagagaaattctgacttgagtataagaaaagatgttatctttaatgctgtaaaactaaatagtctctttttttcttttctttttaatatttttattaggtattttcctcatttacatttccaatgctatcccaaaagtcccccataacctccaccccctctccccttcccacccacttccactttttggccctggtgttcccctgtactggggcatataaagtttgcatgtccaatgggcctctctttccagtgatggccgactaggccatcttttgatacatatgcagctagagtcaagagctccggggtactggttagttcataatgttgttccacctatagggttgcagttccctttagctccttgtgtactttctctagctcctccattgggggccctgtgatccatccaatagctgactgtgagcatccacttctgtgtttgctaggccacggcatagtctcacaagagacagctatatctgggtcctttcagcaaaatcttgctagtgtacgcaatggtgtcagcatttggaagctgattatgggatggatccccggatatggcagtctctagatggtccacccttttgtctcagttacaaactttgtctctgtaactccttccatgagtgttttgttcccaattctaagaaggggcaaagtgtccacactttggtgttcgttcttcttgagtttcatgtgtttagcaaattgtatcttatatcttgggtatcccaagtttctgggctaatatccacttatcagtgagtatatattgtgtgagttcctttgtgattgggttacctcactcaggatgatgccctctaggtccaaccattagcctaggaatttcataaattcattccttttaaggtagtactccattgtgtaaatgtaccaccttttttgtatccattcctctgttgtggggcatctgggttctttccagcttctggctattataaataaggctgctatgaacatagtggagcatgtttccttcttaccggttgggacatcttctggatatatgcccaggagaggtattgcaggatcctccggtagtactacatccaattttctgaggaactgccagactgatttccagagtggttgtacaagcttgcaatcccaccaacaatgaaggaatgttcctctttctccacatccttgacagcatctgctgtcacctgaagttttgatcttagccattatgactggtgtgaggtagaatctcagggttgttttgatttgcatttccctgatgattaaggatgttgaacattttttcaggtgcttctctgccattggttattccttaggtaagaattctttgttcagctctgagccccattttttaatggggttatttgattttctggagtccaccttcttgagttctttatatatattggatattagtcccctacctgatttaggataggtaaagatcctttcccaatctgttggtggtctttttatcttattgatggtgtcttttgccttgcagaagctttgcaactgtatgaggttccatttatcgattctcgatcttacagcacaagccattgctcttctattcaggaatttttcccctgtgcccatatcttccaggattttccctactttctcctctgtaagtttcagtgtctctggttttatgtggagttccttaatccacttagatttgaccttagtacaaggagataggaatggatcaattcccattcttctacatgataaccaccagttgtgccagcaccatttgttgaaaatgctgtcttttttccactggatggttttagctcccttgtcaaagatcaagtgaccataggtgtgtgggttcatctctgggtcttcaattctgtcccattggtctacttgtcggttgctataccagtaccatgcaaaaactaaatattcttaatatagatcataattttaataagagaatttcctgtaaagatccttaaaataaatgtgatagacactgatctctacccctaaaagatagtgtcttaggttttacaaagcatggacgctgggtttgtaactcaattctacctcttaattttagtcttaggtacatcgtgtgatatacacccttctcggtaactctgtaaataaagatagtaaatcccactgtgtagaacatatggaggttagtggagataatttacatgcttcatcagcatgttactgaacagtgggcacttacaaccatcactcttcatggttgttattaaaacaaggccttccctatcaatgagatatgcaaaaggctgcctcctgcttgggatgtttagccccccagaaagccaagcataatcctgggggcccattgtcaagtaagctgggacagactacatgccttagttgtcattcatccacacattggggaacaggaaatcacttcccttgagactcatactaagctctgaacactgtcaggaaaagatgtaggaatgagagaggggagcaaggagaaatgaagaccatgagttttctgatttttctgttggatatcctttgaagtggtcagtagcagtagctattcagagtccttactagtaccccttctttatccatacaaacaagaggcagagttgcataagaaaaacagacaaaaatgaatgggtcagctatccagaaagtggactcctgtcttaattacttgccctcctgaagctatgaaacctcagacaagttacttttgtacctaaacctgtttccaattcgaagtcctggattatcaaacattcgttttttagctttaagatgttacaagtctttgtgttgtgtctctaatccatgaactgtgtgtcttctagctcatagagaaatagagcataatatcttctcacctcttagctgctttgcctggtctcaggagctttttgtttctatgctgtctctgagctcttacataagtttggttttcagcctccagaggaagccccctggagtctcctagacacttagaatccctaggaactttccccttggtctttgctgaagacccaatctggaattcggtagagaagtaggaataacaggtaagaaagaaaagacgattagtccagtgtgatgtgatggtcactctactatactacagtcttctgtcctttgttcatttagtcctcacagtaggttgaatgtaatttttattttaaaggctcaagaaatgaaaatttttgccaaccaataagccattggcatctgtcacaaccccaaggtcactatttgtctccatttccaccatataaacttacaaagtagattgctagtaattgtttggtcatctttttttttctgatcagtactaaattatgtatttgaattcctaaggtctttttttttgggggggggaggtttcaagacagggtttctctgtgtagccctggctgtcctggcactcactttgtaaaccaagctggcctccaactcagaaatccgcctgcctctgcctcccgagtgctgggattaaaggtcattttaagtcaatataaacagaaattatactatgggaaattacttgaggaaagaaagcaattttacatgagtaattagttttctattaatttttcattcaaaagtttcctgattaatattactatattaacaaagaaaaatactagattcctttgttatgattctgcttatatttgtgtctctgaaaacagattgtgtgacatgagttttctgggatactccatttattaaagtaaatgttgattgatagagtgagccaactaatgatgactcattagaaatacaggattttttaaaatttcagggttataaacacatacatttcaatacataattcacataggatttcattaactgaattttaaggaaagtattatgttagcatactgtcacctatgggaactcttatgtgttgaaagccagttcaatgatggcttaggtagtcctcatcaggagttgtgtcgcatgctgtgatagttacagagagacgtagaaggggcttgggcagcataggaagtagggggcaggagagaaatgaggagagagaaaaagaggaaaatacaagtgcatttatttagttttgtttaactggcacacacacacacttacacaccacattgtcaaatagttctctgcctggtagtctgtgcactctggtcatgcctactgggcattaaaatacacttcggataagtcaaggggaatttgaagttctgtcttttttaaatcaatcggatccactgttttatggaaatctctaagaattcagttgtgtgtcaagctcatgattttgttttgctgatttctaggcaagtcagctgcaggtagaaagcgtttgctatacattcttgtgctgcttttctgaactctgccttaatattttattaacctaaatagagttttcacattatgagtgctgtttctgcttaatgagaataggaaatggaagcagatgccttgaggcagacactgcatctgagtggtccccttcaggaccactgcgtttagctaagcacatattatccaatgaccatttgtagactgtctgactcagagccactgctattactatctttcctgtgaagccagatgtgaattcttttttagagtctggttcactaatatacttttaaaggtctttctggttcagtaatatacttttaaaggcctaggaaactgtagtaaaatacttaaagtgcatgcattttgacctgagttcaatccccaggctaaggggctagagagacagctcagatgactctttcagagcacatagttcagtttccagcacccacatgatggctcactaccctatataaccccaattctaggaaacccaacaccctctttcaacctcccaagggtagtcatgcatgtggtacaggcatttccatacacataaaaataaataaaattgaaaagaaagtaaagtagaacttgattgaggaagaatcatcagcctttaacctacacacacacaaaacaacgacgatgacgatagtgatgacgatgatgatagtgatagtaataataccactttttaaaataataggcaagtatgatagctcatacttgtaattatcttagcccttgggaagatgagacaggaggattgccataagtctaaggtcagttagctagatagtgaattccagggcagcctgggctacaaagtaagtgccaaagtaagctgtagtacattgttaaagagattagtaaagtaaaaagaatgctgtggtagtgtcaaaaggatgcactcatgtctgatgtacgtgagtggttgtacacctcttacagacataaactatttgtgtttgtgactgtgactttttaggtctcaaaaaatacttggaataattagtcaatcaatatttgcctctttttgttaatttgaagacaaaagatcttactcatcttggactgtttataaaattcctgatgaattctctccctcagcagagttaaatgttcactggcatgaaatgggctctcggatgtctactgaattatattgtggatgttcaggtctcaaaacatgcttataagtcatagcagattttgtggaaatgtttcaatctttgctttttactgaaacaccaaactggatagagttctaaggtcaatagaagcaaacactctttttaacaaatatgtactgccttcagcgagacaatgagctaagcaataaggaaagagcagtattgggtcagctcagcacttgcccttgtcaggagccccagccgccagccagcctgagttctacttcctgaggccttcacctaagtcatcctttgcctcattatctgctacacatttcaaacctgctacaaaaaatgttttcttagccttctcttgtggagtttttttctcccctcttctctccccctcatctctttcttggtaaataagatttatcttcattccagtgaaagaaggaaacattcattgcacttagctcttatgtattctggggccttggctcacagcaggcctctgtagggacaagatgagcagggctgcagactgggttatgagagcagatatgggcaactgactgggatttacagtcaaggactctctatctccagaacactgcaccagccaacacggaaccatcaccctttggagatacacagttgactttctgtgagctttggtcacagcaaccaatcaataatcctgcttcacatatttcagtttaaagatgcccactttaataaacttgattcattaacaccaaactcacagacccagcagcatcctgtatactaagtaaaggtatatcacattcacactttcttaaaaagacacattacaactttcttgtgtctagaaacacagggccggtgcttcagcactgtgctgagagccattctagtgactcaacagaacaaaagaataaacacaaagtacaaaagcccggggttaaataaaccatgaaaagaactcttatttatagcatggaggctgagacatgaaggcagagcatcaccgtgcctgacctcagctgtgatggtgtaactcagatttctctttgcgcctcatatgtgtgtgagtaagccggaaaatgacatgagcattggattgggggttacaaataaattttaccatgtggacaaatttgtgaatacggaatcattaataaaaattcttaataaatgttctattaaaacacaataggactccagcactggggttccttgcccacggagtctccggacacccacaaggacccacacatgatcccccacgggatcttaagacctctggtgagttgaacacagcgtctgctccaatacaatctcgtgggacctgagactgcattaactagggaagcagataacccagcctgatcaggggcacaagtcccttccggtccactccagcaccggggttccatgcactcggagtttctggatagccccaaggtcctcactggaccctccacgggatctttagacctctggtgagtggaacacaacttctgccaggaggaacgttcgaacactagatatccgggcaccttccctgcaagaggagagcttgcctgcagagagtactctgaccactgaaactaaggagagagctggtctaacatagtcacccgagaaacaagctctaaccagagacaactataacaactagctccagagattaccagatggcgagaggcaaacgtaagaatcctactaacagaaatcaagaccactcaccatcatcagaacacagcactcccacccctcctagtcctgggcacccaaacacacccggagagctagacctggatttaaaagcatatctcatgataatggtagaggacatcaagaaggactttaataactcacttaaagaaatacaggagaacacagctaaacaggtagaagaccttaaagaggaaacacaaaaaacccttaaagaatggcaggaaaatacgaccaaacaggtgatggaattgaataaaatcatccaagacctaaaaagggaagtagacacaataaagaaaacccaaagtgaggcaacgctggagatagaaaccctaggaaagaaatctggaaccatagatgtgagcatctgcaacagaatacaagagatggaagagagaatctcaggtgcagaagattccatagagaacattggcacaacaatcaaagaaaatacaaaatgcaaaaagatcctgactcaaaacatccaggaaatccagcacacaatgagaagaccaaacctacgcataataggagttgatgagaatgaagattttcaacttaaagggccagcaaatatcttcaacaaaattatagaagaaaacttcccaaacgtaaagaatgacatgcccatgagcatacaagaagcctacagaactccaaatagactggaccagaaaagaaattcctcccgacacataataatcagaacaacaaatgcactaaataaagagagaatattaaaagcagtaagggagaaaggtcaagtaacatagaaaggcaggcctatcagaattacaccagacttctcaccagagacgatgaaagccagaggagcctggacaaatgttatacagacactaagagaacacaaatgccagcccaggctactatacccggccaaactctcaattaccatagatggagaaaccaaagtattccaggacaaaactaaattcacccattatctctccacgaatccagcccttcaaaggataataacagaaaaaaaccaatacaaggacgggaaccacgccctagaaaaaacaagaagataatccctcaacaaaactaaaagaagacagccacaagaacagaatgccaactttaacaacaaaaataacaggaagcaacaattacttttccttaatatctcttaatatcaatggtctcaactccccaataaaaagacatagactaacaaactggctacacaaacaagacccaacattttgctgcttacaagaaactcatctcagagaaaaagatagacactacctcagaatgaaagactggaaaacaattttccaagcaaatggtatgaagaaacaagctggagtagccatcctaatatctgataagattgacttccaacccaaagttatcaaaaaagacaaggaggggcacttcatactcatcaaaggtaaaatccgccaagaggaactctcaattatgaatatctatgctccaaatacaagggcagccacattcattaaagaaactttagtaaagctcaaagcacacattgcacctcacacaataatagtgggagacttcaacacaccactttcaccaatggacagatcttggaaacagaaactaaacagggacacagtgaaactaacagaagtgattaaacaaatggatctgacagatatctacagaacattttatcctaaaacaaaaggatataccttcttctcagcacctcatggtaccttctctaaaattgaccacataattggtcacaaaacaagcctcaacatatacaaaaatattgaaattgtcccatgcatcctatcagatcaccatggactaaggctgatcttcaataacaaaataaataatagaaagccaacattcacgtggaaactgaacaacactcttctcaatgataccttggtcaaggaaggaataaagaaagaaattaaggactttttcgagtttaatgaaaatgaagccacaacatacccaaacttatgggacacaatgaaagcattcctaagaggaaaactcatagctctgagtgcctccaaaaagaaactagagagagcacacattagcagcttgacaacacacctgaaaggtctagaagaaaaggaagcaaattcacccaagaggagtagaaggcaggaaataatcaaactcaggggtgaaatcaaccaagtggaaacaagaagaactgttcaaagaatcaaccaatcaaggagctggttctttgagaaaatcaacaagatagataaacacttagccagactcactagagggcacagggaaagcatcctaattaacaaaatcagaaatgaaaagggagacataacaacagatcctgaagaaatccaaaacaccatcagatccttctacaaaaggctatactcaacaaaactggaaaacctggatgaaatggacaagttcctagacagataccaggtaccaaagctaaatcaagatcaggttaatgttctcaacagtcctatatcccctaaagaaatagaagcactcattaatagtctcccagccaaaaaagcccaggaccagatgggtttagtgcagagttctatcagaccttcaaagaagacctaattccagttcttcacaaactattccacaagatagaagtagaaggtactctacccaattcattttatgaagccactattactctgatacctaaaccacaaaaagacccaacaaagatagagaacttcagaccaatttcccttatgaatatcgatgcaaaaatcctcaataaagttcttgctaaccgaatccaagaacacatcaaaacaatcatccatcctgaccaagtaggtttcatcccagggatgcagggatggttcaatatacggaaatccatcaatgtaatccagtatataaacaaactcaaagacaaaaaccacatgatcgtctcgttagatgctgagaaagcatttgacaaaatccaacatccattcatgataaaagtcttggaaagatcaggaattcaaggcccatacctaaacatgataaaagcaatctacagcaaaccaatagccaacatcaaagtaaatggtgagaagctggaagcaatcccactaaaatcagggactagacaaggctgtcctctctcgccctacctattcaacattgtacttgaagtcctagccagagcaattagacaacaaaaggagatcaaggggatacaaattggaaaggaagaagtcaaaatatcactttttgcagatgatatgatagtatatataagtgaccctaaaaattccaccagagaactcctaaacctgataaacagcttcggtgaagtagctggatataaaataaactcaaacaagtcaatggcctttctctacacaaagaataaacaggctgagaaagaaattagggaaacaacacccttctcaatagtcacaaataatataaaataccttagcgtgactcaaactaaggaagtgaaagatctgtatgataagaacttcaagtctctaaagaaagaaattaaagaagatctcagaagatggaaagatctcccatgctcatggattggcaggatcaacattgtaaaaatggccatcttcccaaaagcaatctacagattcactgcaatccccatcaaaattccaactcaattcttccacgaattagaaagggcaatcggcagattcatctggaataacaaaaaaccgaggatagcaaaaactcttctcaaggataaaagaacctctggtggaatcaccatgccggacctaaaactgtactacagagcaattgtgatcaaaactgcatggtactggtatagtgacagacaagtagaccaatggaacagaattgaagacccagagatgaatccacacacctatggtcacttgatctttgacaagggagctaaaaccatacagtggaaaaaagacagcattttcaacaaatggtgctggcacaactggtggttatcatgtagaagaatgggaattgatccatttctatctccttgtactaaggtcaaatctaagtggattaaggaactccacataaaaccagagacactgaaacttatagaggagaaagtagggaaaagccgtgaagatatgggtacaggggaaaaaaatcctgaatagaacagcaatggcttgtgctgtaagatcaagaatcgataaatgggacctcataaaattgcaaagcttctgcaaagcaaaagacaccatcaataagacaaaaaggtcaccaacagattgggaaaggatctttacctatcccaaatcggataggggactaatatccaatatatataaagaactcaagaaggtggactccagaaaatcaaataaccccattaaaaaatggggctcagagctgaacaaagaattctcacctgaggaatactgaatggcagagaagcacctgaaaaaatgttcaacatccttaatcatcagggaaatgcaaatcaaaacaaccctgagattccacttcactccagtcagaatggctaggatcaaacactcaggtgacagcagatgctggcgaggatgtggagaaagaggaacagtcctccattgttggtgggattgcaagcttgtacaaccactctggaaatcagtctggcggttcctcagaaaattggacatagtactaccggaggatcccgcaatacctctcctgggcatatatccagaagatgtcccaaccggtaagaaggacacatactccactgtgttcatagcagccttgtttataatagccagaagctggaaagaacccagatgcccctcaacagaggaatggatacagaaaatgtggtacatatacacaatggaatactactcagctactaaaaaagaatgaatttatgaaattcctaggcaaatggatggacctggagggcatcatcctgagtgaggtaacacaatcacaaaagaactcaaatgatatgtactcactgataagtggatattagcccagaaacttagtattcccaagatataagatacaatttgcaaaacacatgaaactgaagaagattgaagaccaaagtgtggacactttgccccttcttagaattggaaacaatcacccatggaaggagttacagagacaaagtttggagctgagacaaaaggatggaccatctagagactgccatatccagggatccataccataattagcctccaaacgatgacaccattccatacactagcaagcgtttgctgaaaggaccctgatattgctttctcttgtgagactaggcaggggcctagcaaacacagaagtggatgctcacagtcagctattggatggatcacagggcccccaatggaggagctagagaaagtatccaaggaggtaaagagatctgcaaccctgtaggtgcaacaacattatgaactaaccagtaccccggagctcttgactctagctgcatatgtatcaaaagatggcctagtcggccatcactggaaagagaggcccattggaccagcaaactttatatgccccagtacaggggaatgccagggccaaaaagtgggaatgggtgggtaggggattggggggggggagggtatgggggactttggggatagcattggaaatgtaattgaggaaaatacgtaataaaaaaaatttaaaaaaaaccaaaaattaaaaatcaatagaacattaagataatttacagaataaaacgtatttagtcaaggggagatggctcagtgggtaacgtgcttgtggacttgagttgaaactttggaacccatatataaaggggataaaagaagtgagggtgatcccagcactggagatgggcatagggctcacactcacctgcagccagtgtgtccagtaatccagctctcagccagtaagagactcaaaaaagtttcaaaaaggtagatggtgcccctgtctacatacatgcatacacatctgctatgtacagacacaagttataatgccggtaggttgggacattttaaatttcaagttagtaaagtagatagtgcatctgtaacagtcaccacagcactgtagcttagtgaaagcttttttttttttttttcggttttttgagacagggtttctggctgtcctggaacttactttatagaccaggctggtctcgaactcagaaatccgcctgcctctgcctcctgagtgctgggattaaaggcatgcgctgctaagcccagctttagtgaaagctattgttaagtgctcaggctctacagcccttgtgttcactaatgatagcaaggagcaccactgtattctctgcctccagtgtggcagttaaagctgctgtttggcctgacctccttgggtcatgggggagggaatcattctcatgcattagtgttactgtaaagatgtgagcgtcatatggaaacgtttgatcctaatgaatggtctaagtgttgctcttggacctttgtgccactttatgttgccgaccagatacaaatgacattctcaagctggttttagttaactagttaatgttagaaatcgagagtttccagtacagtaactgaaaaacattgctgtacattatcagtgcattattctgttgacagaaggacaaatgggaaacacacacacttagttttatatccttatacagccaagtggaaatgacctaagtggcctaaaataatggattagatcatagctggaagcttatttttattttggaataaaatattagattttaaaatagtcttgtgagtaaattcaaattatgtaagtactttgacatacctatataaaaaaatcaggatagggatggtaagcagatagtttacttggacatgtgttactgtcagtgtgactgcttggcagcatagtctccaggaattccaattaaccatgtaaatatatttcataacatcacatctcacttttcagaacccctgctgtgttctataattatcataaatgcaggtgtaaatcgcagttatgtatgctgatagaaagcagttggagacatttcactgtgggacacaacactttgagattgtgtacatctgttctaataaagtagccagccttggtgacataaacacaaggaggaacacacatctgcccttgagaccacttgccatatagcagatgcttgcatctttatttatgcagatggcgggtgtgatgagttgaacagggataaaagccaagtagtttgataggggtttttaggttgctatgcaaaccaaaaagacaagatagacatttttgttttcaaaatgtaatactgataggaccagagattcaaaaacctggcaatgcttttaacagtgttgacatactgttcttgtcttcagattaattgacataacaatcctaaagatatttacaaagatgccagcatccagcttatggtagaaagcactgctcagcttgaggtctagctcagtggcagaattctttgtttacttatatgcttaaagttctgagcttgatcctggttgctacaaagagagaaagcagcagatcaatttatgattatttgggttttgataaactaatttaaaataatttaacatatttctggttttgatgctttaaaagcaatgtttatttttgaaaaattatgtactgtcaacaaaagcttgtgatttttttaattaggaaaaatataaatatcatgaaataaaaaacaagttatgagatagtccattcatattaagtaacataagtttctgaagaattacaatttaattaagatttttgcctagcattttgtttactctgttctaatattgccaattactgatttttaataatatttcatctagatgaatttctgttagtgtcagaacatttcctgttactctgccacattctttttttgtttgtttgtttgagacagggtttctctgtatagccctggctgtcctggaactcactttgtagaccaggctggcctcaaactcagaaatccgcctgcctctgcctcccaagtgctgggatttaaggcatgcaccaccactgcctggcctctgccatattcttaaggagacaaggcaatagggatgaaagagcaaagcacttctacaactcgctgcccagccctacacaggctgtagaacctcagaacagtctgcgtctcacttgctgcagtgttgctcaagcttcagccttgcctttcctaaagtcaagccctgcagcataagtatgctgtgagtgtgaatcaaagggatatgtactcaaggatcaaggtttaaggtttaatacaacctaagtctaatgctgcattctcaaacttctgggagagcacagtagtgaagacaggtctacttagaatgcaatcactccctggcttcaggtagcttggctcagcacatcctttgcctgtggagtctttattagatagaaatggtgttgagaccctctctggtgtcttcagatctgatgagaaaaacactggttctgtccttcttgctatagggaggaaagtgaggccaaaatagattgaggattgttgtcctgcctagattcatgctagaagtaaatagaagagccaaagacaggcctcacttctctgtcttgcatacactttgttttcttgtctctgaggaagtccgcagcccctgcaagtgtaattcatgggatcaggccatacattacaggtgctgctcaggtttactgcgtaggaggtaccacatgagaaactggtagcattcctggacctcttgactcacacctagagttctttggtgacctcagtagtattgtagagttagaaaatttatgggtaattcatattgttcttttaaattataaaagactcaaatgccaatttttaaaaagttctttatgattgtgatggttaagcatcactttgaagttggtgagattcagagacgcctgaggggttagtaaagcacgatacttctgggtgtgtctgtgcagagattccctgagatagccaatgaaggctctaaggaatccatgcacttctctcctggtgccttcatctcttggcattattgagcagtgatgaaaaagtaggaaataggtccaagtttgaggaaggaagtcttagtggtcagtccttgaagatatcctttgtcctgagtccgtctagtactcttccttccctctgcattcctgacagcagagggatagaacctcctccaccacatgctgacaccagaggatcctcatccaagcaatggaaccaggaagacgtggactgaacctcagaaactgtgagccagagtaaccctccatcccttatgtttctctgttgggtattctaataacagcaccaaaggatggctagcacagtactttaaaatatcatgaaatttccttgtggaatttcagctttataaagcccagtctagggctggggaagatggtcaccaaacccaacagcctgaattcagtctccagcaagcaggtaaaaagctggatgcaatggcatgcatctgtaaacccagcattcctttctcaagacaggaagtgaaaacaggagaatcagccagaagctttcaagccacctagtatgggttattcagtacagtgttagaaacaataaaagagatcctgcttcaatgaagtggaagtcaagaatcaacccctgactcctacatacaagctaaggaatgcctgcaaacacacacacacacacacacacacacacacacacacacacacacacagacacatgcacaattacagtttgaacaagaagtagtttgctgcaagcctggcatgcttaccagaagtaaagcatgtcctatgtgccaagcctgccctttgaatactattacactgtagactgctgtatgcaggctccacaacctgcttttgtagcctaagctatgagctgctgatggaactagaagaccaacattcagttactctccttcctggaaacctgatgaatccactggtagagactaacatatataaaagaatgaacttcaaaacaacttattgagttcactgtgtttagaacaagggaaatgttttggtgccatgtagatctggatccaaatccacctcttttcagtgttgtggccttgcaagaaatgttcagtttccacaaccacagattgactgttaatttaaaatcgagtgtaaagtgaagcaagttaagcattccattccctgacttaatggaatttaaggattgaggaagtggaaggaagagtaggaaggaagttcataagcagacacaagaaatacacagactacttagagagcacattcatgaaagaaggtggcagagctatagctgcagcaaagacaaagcttgggtactcactgctgttgtgcttttaatatttttatgattaggaaaaaagataagagaaagaaagcaagacaatatggtttagaattcctagttcacctctttagtcagtaaatactgcaatgtgcaacagccagatagtaatctaggggctgagattctggcattggatgaaacaattcctgccttacagaacttacgtttttttgtgggaagagacagatagtatattagtatagagataaaagtcatgatggtcaattaaagcataaaaggaggacagccagcagtgacctagaagggtccaggcaggcctcctgagagccgggagatctctatgatgttgactgcagagcaaggaatgggtacgcggtgaagttaacagtcttccatctcttcactctaaagtctgtctgtattttactctgttgagacaggtaagttgtcagtgcatcaccttcctccctatcctgggaggggtgatacttgtggagcataattaataacagaaaggagatatagaaacagaaagaaggatggcaaatggtctcccacatagcagccacaatcacgagatcattgttaatcattgtcaagaaggacatgccctggagggtaagagaggcatgggaaatacaacttggagaatcttgaatgagcccctgcgactaagcaaagtccaaggacaatagacaaacaatggagtagattgtggtgaggttttgagactggaagtttcaagctttttacattggccactattcatggtaggtagatgtctccagccctaattagtcatgagtagagagcacaaggcaggctacttggaacgggggccaaaagaggatagagatggggctaacctatgatatgctgatagtgtccatggatacccagtcatgaagccaggtatggacccggagtgtctacctgtgtgcatatatacacagacaggcaagcccacaggcaaggagaatacagatagacctcataatcacttatcgcctgtggaaacaaggtcttacctgttcccagccacttgagaagacaagttcaaaggagaataaagacactgatggaggagaaaacagacaataatcaaaggaaaaggaatccaaagtgcccagagttttcagatctgggtgactttgttcctttaatagctcttgcagaatctgatctcaagcatgctcaggataatgtggccatcaacgcaggtagaatgtgattagttgtagctcagggcctgtagatgtttgttaacaaagccattcaggtcactcccaccgaaatgtctcgttctgtgtgtgctagttagtgcctgtcatttcattgtcttctccattgcctgcatagtctttggattgtaggtacccatgctaaagaaacatgtgccttgactaaagagccacaggcaagacttgaaaaccagtgttaggaaacagcgaggtagtcacaagggattgcttttcttgcaacagatccacagctgcccagcctcgtgtgtttgtacttataaatcataagctgttggcataaaagctgatgtgtggggaaaagtgcagcaaaaatgttataaatcactgtgactcaaagataaatcaggggctaagatagtgtctgtaaggctacactggagagcacagccctgtcctttcctcttcactccctttcttcttgatctgcacaggggttgagtccaggttctgaggcatgttgggcaggtctttacattgctaagctgcacacttccaatccttactttgtaaatgcagtttgtgtactcctccaaattgtcccactgtataaacttacttttgaaattacaaaataaaaataatatctttgtggcaccaagatcttgcttttaactgtatcattggtaaaaggtcattatcttaatcatttgagttatatgatggtgtttagaagaacagtaagaaacacccaaccttatgcatggatcctgcaaaatatactgcctgatgctgaaccttagcctattgttttccttatcaaacatcgtcttattcctcatcacagacacttagctattataactactattgaaatacaagatagaaaagatgtaatcctagcccttgtggagagagtacaggtgggacctagttaggttggttttgctgggaagcagcagtaggccttctgggatgaagggttaaaggtcatcttccactacgtggtgagcttgagggcagctcaggctatgggaaaccctatcttaaaagcaagcaaacaaaacatgattttttttaatggccattttcattggctgatgaaagatttcatgcccagacatttgtgctaggcacaaaactctttcaagaaatggtttccattattttagcatcagaatgccctggaaagacagtgtgcacaggtatgtgtcacagtgtaaagatgccaggaggaggtgtgctgcccctatagtgtggaggttcagttatcagggtctgaatttcatatgcaatgcaacgttagcagttctggagacattcagaagtgtctgggtacttggagtctgtggcaagttatcagcactttggcagatccccgcgctctccagccctttgtaggtttggagagacacttggcttgactgttgtgtagcagtaataagcttttgtgttgctacatattattcctgccaaggtaagttaaaaaaacaaaatgttttccttgtatggttgtcagtgtttcttatctgaagctcttatataaaaagtccttccaaaaggaagaactataaaagagttttgacatggaaaaacttgaaacttgttgaaattgatattttctaggaggtattttaacaaaaaaaaaaaaaaaaaaccaaccttctaaacttacttttcatttggagcaaagctttagctcccctaaagaatagttacttaagtgtcagtagctgcattgtttaaatattttttattaccattgatatttgatgtaattaacttttaaattctttacaaagaacgtttgtttcctcttcctttggtcttcgtgcttgtctaacttactctgtattgtagactttggttccctttgattcccaatccttctttctgtactcgagctttcttaaagttactctctgatttactactgtgttcttacgggcacatgccatgcatacgttttggctccagtgcacacatatggtagttagtcatggacagttctgtgttgctacgtattatacattgttttctctttgtgccgttgaactcaggtcaggcttattcacaagtgcctctacataccccctgggccatctttcctatcctattgaactaatttcttaattatttaattagtaaactactaaatctacaaataagcactatcaaaatactttcccctaccccaggccacagttttcacttctgctgtcctatagaaatgtggcagtgagcatcctaaaccccaccagcagccttcctccctgctggaccagaaaggggctctccttgcaagccagtagctttcttccctgctgtgtataagcaaaaataagaagaggtatccccacaactccaactcagctccttaaaatgcacatgttaactcccattcacactgaactgttaatccaattaacacttagtcaactgacaactgagatgggggaccattgggaataaaatctgacagaatggatcagatactgggcaaggacacaggagaggcagggtttgagcagttcttactaacatgcatcatttctcctccctttcctcaattgcttctcataaaagaaacactgctataaaaattcagacttattccatccatgtcatgagattttcagttttgtgtctttttttttcttcctaccaaatgtaaatatcagaagctccctgattacttcctggcaggagaaaggatacgctgagcagacagctggtgagaaccaccctggaccctccaggaaggatttctcttatcttactgtgacaccacctttgtagctatatattgtgcccattttatagatgacaacatttatacacagagtgacttgccaaaactcaagagcattgtagaggtaggtgacatcgaatctaacagaacctgagcccctccattgttattccagagattgtgaaggtggccatagctacccctgggaaaatgagaaagcatccagaagccagaatttgagtgccaacgtcattatttagagcttggagctcttcttcatttgtgaaagcttaaaacagtactttctcattcgcctgactttgggtacctggcacataaaatacttcttagtgttgagataatgtttagaaaacaatctttataaagaaacatagctgggaggaggggggattcttttttttttttttaataggaaggccgttaagtttacctgtttggcccttgccaagtagaaaagcctgctggttatgggtgttgacatgagagaagagggttgtgacctgaaagcccagttcagcagactagggcacatgtgccagggagactgggcaaaaccaaactcagatttcacctggaaatgtgttttcttgtgttacttccatttcctggaatgtgggtccaggtaatgatgatgccagccatcacagtgtaacagtgtagggactctgtgtgtttgtcatcctgtgtccttcaaagtttgtgctgttgagcacattgctggtggatttattatctttttcaacaaaatgagttgtgctcatttgggttttgaattatttcttttatcctaaatttccaaggtttagcatacttattttaagcagagacaatcttgaaatatttgaactccaccggaagtttctaatttcaaagccaaatgaaagagggagaatctagacccccaacaaattaaaactggtttgtttgtttgtttgtttgtttgtttcagcctagtaaaattaaaacctgaacagtttctaaaatgttgtctttgccagcttatttgacagcacctcttaactctgcaggtgcggtaaaagaattttcaccaagcccaagaatgtagtgggtgggaacatcctggttaacctcagccagaccctcagttctgccctggagactgggaagggactagatttcagcaatctagagagtcaccctgtgggcctgtctcagcagggtccagccagtagtttgaggactctgttaatgaggatagacacagaccgaagctcttgagcccctggttgatccttcctaccactaacatgtgaggagtcacacacacacacacacacatatacacacacatatacccacatacatacacacacatatacacacacacacatatacacacatacacacacacatatacacacacacacatatacacacatacacacacacatatacacacacacatatacacacacacacacacatatacacacatacacacgcacacacacacatacacacacacacacacacacacacacacacacacacacacacagccagccttttgctgatgaaggaggggaagaaaggctcatgctgctcagctcattctccacacaggtttctccagcctttgtggatttctcagaatcctgtggttgtaaatagcaagctcagctctaaaaattacttttctttccttccacacagctgaattttataaaaattagctctaataatgaacttctaaaagtatcatttactgggtcacagacttgacacgccatttagtttcagtttgtcttgttttctctttaaaattctggaatggtaatctagtttgggaatgattaagatgcaggaaaggaaagagaaggaaagttgtgccttcaaaaggagtaggtcaggctatgccacatacataatccgttggctatatggatggactctccttgccttctccttggcctcacttttcctaatctgtaaaaggggagcaatgatactttcttggagttaaatgtaggttcagttaaatacctgctatagatttcaggtcataggcagtactcagcacttacctgattccctttattccacagtctgatcaattctcaccatctatagatgtcacttttcaaaatggctactttaatatcctaaatcctaaaaacagcccacacttaaaattttaatattaagtatgctcattgaataatgaatactacaaaattagttttactgagtgagctttttatgctcttagttaataaaggtccatgtttagtacctgagggtcctatgaatctctttaactctgttatggctaattgtgcagaatttccagaaatgataaatgcagtggaaatccctgttttgttgttcagtgcatagctctctaatctccagagcttagcattgcaggtgacggggtgagaccttgctgtctgtgacgagcctgtcagggtagtgcagtgaacggctgctgtgttgccaagagaggctcaccagtcatgctttcccagcactcagagtttaaaacatggcatggcacttcatctcctctagggacttctactgttcaaacaatattttttttaattgtagttattttaacataactggcttttactgcaaatgtgtggagaagcaaggcttggattcctgcttgtccttgaggggagatgagctgtacgtcctcatatatatgagacggtgatgtgttacctgccacactctgatcatcagttcttgtctaaataaataaataaatacataaataaatacataaataaatggcacaagccattctgtgtgtctaaaccacacagtcacaagtagcccaaaagatcccactttcagaaaacaattcagagaccagtcaggtggttcagtgggtaaagtcaactatcaccaagtctgacaatttgagttcaggcctcagacccatctcacagaaggagccacttatgcagcttgtcctcagccctccacatagtcaccgtggcatatgcatacccacatacatactcattagataagtacagatgaaacatctcattcactcattcactgagcaaattactttttagcacctcccaagagccagacagggtagcaagtggacaataatcttcttctacctgattctcagtttcttggctcccatagctattcccatcccacagaagtctctctaagaacccttctgtcatattgaggtatatgtttgggtatgcactccccgacttcaaaatcttaagtgatgagatagtgtctcctaaaaaactcatgtcttgagagtgttccatatcagtttgtcatttccttttacagctaccaagtgttgagtttgaattattcttagctaactcttggtcattaaaatagctcctgagtttgatgtctcttcgtcctcccatttttggggttctatactctttgcctcacttttccaataatgcatcagtttatttcctatctttagtggtttctgggcaatggagcaccattccacccttatgggaaacctcaccttttcacgcacttcctgatagatgcatgccagcatactaacttcaatattcttggcaaagcttgttctccaccccacagatttgagtggctgtgattaaggatcatgaggctgctgagaggcttttcctccccagcatctgactgcactagctaccacttaccagtcacctgggcctgtgattgcaggctatccacactgttccctcaggtaatcagcatgtgatcttgctggggcagagctgggtacctccaggaatgccctttgcttacatctacacttggtctctggttggttgatcttcttcctgctgtgacaaaatgcacttgaggcaggatagggaggaagggggtttgaggggagaatggtggggcctgagaggctgctcacactgaagccagtcaggaagcaggtgacaagcaatgctaatggccttcatcctttgcattctaccagcaccccagcaggtcctatggacctgcctccttagtaaaacctcttcccagaagttcatctcctagagagctctaaagccatcacaacatctttttctctgatgtcattgcttttcctgtataattctgccccttctatgttgaagagatgcagctattgtgtgcagcttactctcatacaggtagcaataggtgcctcctaacgtaatagtaaagaactttctaaagaagttttcatactttgcaagttattcctattatgttgcttatattaacatagtgtttacaagcaactttctttcaaattgttggctcacaaactgcagtcaaaagggattgattgtaaaactgttaccctgtatttcattggatttttagattcccacattcctatccctggaattcctcaaacaaatgtttctaaaatgcctttacacagagctccaaaatctaaagtaaaaaatggggtacctaagtcatttagaggcaaaaccctgaactgtaataaaaccattcagatctttgatttgcctgcatgttgtgatataatgtgctgtgcttcagaaataacagtgagtttaattatggtgccctgcagagttgtctgtgtgtgtgtttctatctcactacttttctaaaatctgaaagtgcaaattctaacactcatgcacccccacaattttcagaaaggggattatgggcttgcaatatcaagctcctaaactagtatgtgcactagtacatttaagcttaaatgaagtttgattgatatgaggcacttaaaaataagaaacttctccacagccaggccttgtgaccttgaggccttgagaaataaagtggatgattcagtccttagactgggggagccaaaacatttccctaattgttctcttaaggtcgtagtaattgctctgtggtcatactaataaatctgggatgaatggaacattattctgtcagttaaaattgtcctgattactatcctagaaagtgctttctgtgtgattcatggcccccaactcccatcccctttagctctgtacttttatcatcctgtgtctctttggttatgtttagctttttttttttaaagtcacatcagcttttttttttttaatacttaaaatttaattgcaaaagcatacataaatactttgaaaggtgtggaaagaaaattcacaagtcgtacaagaactgcactaaagtcaccttcagtctggaacccatcactttgcaaagcaaactgcactgccagcatcaaatggtacagcctaaacccgagggaaaagccagtggatgcagaagcatttgtgttagaccaaagatgcaatgggtgatagatgaactttgtgtgccttagcttcatcaagcttaggtgtgctggcaaggcgtctatatgaaacaaaggacacaataaaatgtaccagaggagatacattgtagctctggaggtcaggaaggaaagtggggttgctctggttttgggtcaaatttgtataaagacagaagctggataaagggcttacagagcacgaggaccagaaggaccagctctctggaagctctgtttaatggctgacatttaacaggagacttctgttgcaacagtagggaataaccatccttgggaaagcaaggcagagaggtgaccttcaagccttgtcttgaaggacataggtagttgcttagaaatatggctgcaggctaaggaatctgttctgaacagataaattgtgtgagtgtttgtgtgtgtgtgtgtgtgtgtgtgtgtgtgtgtgtgtgtgcatactcataagttcactggtgtgggtatgtgcccatgagtgcagttgcctgcatagggcagaagaggacattggatctcttgcaactgaagttgagacacctatgagtcctccaacatgagtgcagggaaatgaacccaggtcctatgcaatgcagtgtgtcctcttaagtgttgggccaagtctctagcccaggtcagatgtgacttgaagtttcagtccagaacagatacattgtagtaatctatgtattgtcattgcaggtgaatcaaacatccgttctggaacaacacagagtgggaaaacattacagagtaagagtcagtttaggaccattgcaccaaaagttgtacctaaggtcctaacatccagagtgcttccctgcccttcctcaatttctgaccaagggagtctgactctaatgcccaagcctctgggcatgcccacccagaactatgctctgatgcaggtggctggccaagaggggacgttttctcttgttgctttcccaaatgttgcctcagcccagccagttcagaagcccagaatgtccacacatgaaaaccttaaactgcctattcctcgataccaaccactaagtagccaaggattaagaaagaaacaggacctgagctctcccaagagtggctccagtgaccctcctggcccatcccagctatgtcatttgacctcttccccacaagcctatcctgatcctcatcacaaacctagcctgtggaagcaaatgccaactttaaacccttctcccaccaacatcaacacagctacactgaccagtggtgttggccaaggagatttgagtcctctagtgaccaacagctgtggcgatcttgagctttctgccatgccagtgtacactacagaggactcttcttcccaacagagcctcccagcaagtatgcagaaggcaggttgtgccaggaaggaggcacccactacacctgctattgctagtgaagaactcaaagaacagttagcttctgcacagactgtcttgagcagtgcagttcagttgctctctgtagtacccaagggtaaactgcccatcctgcccttaccaagagtgaaaactacagaggtgggcaaagtggaatcagatgctgataatgcagaattgtctttatctggatgcagagcaaactgtgatgagagactgtccatcacagaagggtttgatgcagccacagaaatagccagcaagatagctgctttgcatgggtctaagcagagtgcatgtgaaagtgccttctgtcctgtcaccaaattggatctcagccacaaggcaaaacccagcagtggaataaagagaagaggaagaaaatggaaagtgccagatgagattttagcattgcagggcaaaaggaggaaatgcattattggtatgtgtggagatggcatagaaagagcaagaaacagtccccaagaagccagagaccagaagcccagggttgcttcaaggaagtatcgtaacatcatgcccaagcctgtccttgtcctgtctgctttggcacccctggcgtctcatacggctgtgctgtctcaggctcccagcagcctaggtcaagatgttctgaataatgccctgccttcaaaatgtcttggctccaagcaaagtgacagctctacccctaagcccagctctgtactccgaaatggattctctggcattaaaaagccctggcacatgtgtccagtctgcaactaccactttcaattcaaacaccaccttctagaccacatgaatacacacaccaacagacggccttatagttgcgggatctgtcgcaagacctatgtgcgccccggcagcctgagtgcacatatgaaacttcaccatggtgacaaccaccccaagaaactagtgtgctgtgaattttgtgcaaaagtatttggtcatgtccgagtctatttcggccatctgaaggaggtgcacagggttgtgatcagcacagagccctcccccagtgaactgcagccaggagacacaccaaaaaacaagaacagagatcctggtatgcaaggacctgacaactcactggagaggtaagtgctcgtggaagggaagctgacaggaaagtctgctgtaatatgagaaggaagaccaactcgtggatatttcattcctccctagcatagggaataaaatatccatggaaggagttgcagagacaaagtttagagctaaaacgaaaggatccagagactgccccaccctggggtccatcccataatcagccaccaaacgcagacactattgtatacgccagcaagattttgctgaaaggaccctgatatagctgtctcttgtgaggctttgccagtgtctggcaattacagaagtggatgctcacagtcatctataggatggaacacagggcccctaatgtaggagctagagaaagtacccaagagctaaaagggtctgcaaccctataggaggaacaacaatatgaactaatcagtacccccagaactcgtgtctctagctgcatatgtaggagaagatggccttgtcggccatcattgggaagagaggacccttggtctagcaaactttatatgccccagtacaggggaatgtcagggccaagaagtgggagtgattgggtaggagggcagggtgggggagggtataggggacttttgggatagcatttgaaatgtaaatgaagaaaatatccaatttaaaaaaaagaatcagaaaactcatcagaagtagtgttgcacacatatatagtcctagaacttggcagaaagagacaggaaaatcagaaatttaaggtcagcctaggctgtgtgagaccctgtctcaaaaataacagcaacagcagaagatgtcataggtaaaataagtcgcctctcccactccctcggttctgtgaagaatgaccccatttcctgtggtttctgctcagtcacagtgtgtaagtcaaggcacaaataccagtttggagtatgttggggacagttaggtgacataatttttgtgtctaaaaattaaaataatagattatatatagcttttagtagtctctataaaatagttcccccaaactatcgtttgcagaattcttatcaaaacatcattatctagctcatagtgctgtgtgaggctgccctcttcaccagaccccaaggtgctccactcaccctccacatgtgccttttgtcacctgacaggccaaattaactttctcctgtgtccttctgttttgtaagcactgctccttgacattatttaaaacaaacaagcaaacaaacaaacaaaaagctctgtaatctggaagctgacaaggcaggcatctgagcagtaatgaccagggaagtgcccatagtgtgctccacacaccctcagctgaggtgactgaggaatgaggaggaaaccctgcccaggacctttgctccttgtttttattgttccagttgccttaaatggtttctattctatattatgataaataaaaacaagatgcctgccccagcttttccttgtcttttggctttcctcttctccagtagttctttcccatttccactagcatccctttccctaatgtgcctgccatgcagcctccttcacacttgcttccgtgttcttagatcatcttgcaataagatgtcagaacttgtctaatggtggggtggcatgcatgagtgggacagtcctctccagcagtgccgcatggtgtgtatctcggcagctcccatcttgttacctaatcttcctcttgggtgcatctgtgcaatccagggagctggttctcgcgagggagacgtgggactcctctgaaatggtccctggtgttctcaaagctctatgactctgcaagtggccctgtgtgctgtgttctctgctgaggctcttcagagctctgtctatccctgctttccaaaacctggcagcaagagatccagttgcattttcctagtttatcttacatggactatttctcctgtttccagggaaaccaagtcaagtttggaagaagattttcttctaaaccaggcagatgaagtcaaattgcaaatcagatgtggccgttgtcagatcactgctcagtcttttgctgaaataaagtttcatttgcttcatgttcacggagaggaaattcaaggtcggctgcaagagatgatcctaccaggcagcagatcggatgctccccaccagaagcagtacacagagaggaggaagcaaatgaagccctatgcctctctggaggactctccagcattccctagagtgaaaagactgccagcccctcatcagaacagagaggaagccctggtaggaagtgaaggtggccagtggggaatggctggctcccagcaccccgccaagcttctctggtcccacacaggctttaactgcctgctctgtgctcagatgcttgggcggaaggaggacctgcttcttcactgggtacacaagcacaactgcgaggaccccagcagactctgggctctcctgggaaagttctctaagcagggtgctcctgagctccacagtgaatccaggctgtgatgctgaggccatccagcccaagagatgctgcaccacctttctcactgcctgtgctgctaggatttagttataaggatccagtactccagggccagggccagtgtacagaggaagtacactgtgcgtagttatattttcttaagaaataaaatatgtgccctggatgcatttttctaacatatgtagtctcactttaaaattccatgcattctccaatatcgtagactttatttaataataaataaaaagatcaaaattaggaaactgaaatgtagagaaaattgttattctcaattgcaagcctttgagtatgagtgtgtatgtatttgttttctttgtttgtgtgtgtgtgtgtatgtgtgtgacagagagtgacagagagagagagcaacagagagggaatatatgtacatgtgtccttttattttgatgctatttgattatatttattaacagttaattctacagctgtggaatatagtcccaactgtagtataaagttatatgataaatgttgatatttattagtctctggtttatttgcatatgccctagaacagtcttttgaaaaatgtactctctaccataacataaaatctgtttcaagacacaatttttgttgttttcttaaatgtgcagtgctttgaagagtagtcatcaagtcttctagtgtttcttctcaaaataataggaaaaaatagatacttcagctaataaaaaaatctacttgcttggtagaaagttattttcaggaaatctttgtgaccggaaaatttccacccagagagttattttctgggcagtggggtctcagccccgtgcacatggccaatcctattctgtttgccagacaggcttgagaaagttcccagaaatggagaaagatttggacggataagctacttggtcttgcatcaccttttaaacatctagtttttataggtgccttgtggctgcagcagtgcatgcaggagactctttgtgctaacagttttgcaaacctgtaaaagagatttggtttggattcccaaaagcattttgccatgatttatccattgatcaccctcagcttggcttcagagtgatcacaacaggccctggggtgtttgatgctctcatacccttccattagatgacacagtatgtatgcctgtaccactcaatgattttgctagtttttaaggatatgtattttaaagattataaaacttataatctatcaagaataccatttgaactcaaactccaaaatgattcatagaccatccagtcctgaggtacaaagtagactttcagaaaacctggcctgttggccaagggcaaaatggccattctggtagatgcataccttacaggcaaagctaagtttgatggcactttgtacagctcccactcagccacaagcccttggtgtagagatcgacagtctctggaaataggtggcaagctgggcgaagagaacagaggtgagcagaaggtgtgcttagctccacatttcctttcagaatatgtttcagggcagcagctgaggttgctgactaaatttagaagcaagtccttaggtactgatttatgtcatagaggggctggggtcactcactaagtatctctaagaagactctttgacctggggacatggcttcacatgtcccctcatagagactcacttcatggagttcaggctcctgggttcaagcctttgaagaaggaaaactggaagtagccgtgtgaagggactccttcagatgtcaccctgtagaagtgcacctgtgcctcagtgcccaatgcccttgttctctggacctttaaaccagtgctttgtctagaacgaggagaaggcagctcacattggggagggagtaactgagatggtttatttgggagagaggcccttggatattggcacagttccagcttgtccttccataaagctcctatggggtggaaaagagtactttgccactttgtccctgtgacctggagagaagtctgttttccttaactctagccaccctgtagaataacagtgatgatccccctcaggaagtggctaggaagaatacttaaaacacatggcaataggaggttggtattttttatgctttgggccagatctgaaggaggtacattatagcgtataaaatcactggaaacagcccagatagctctgaaaaacagatagcaagatgaagtacatttatggaggcaggcacttttcaatctgcccccttcccctgtaaccagccctcagccttcctctgctgaagatgttgtcttatgcacataccacccagaagctggtctgagaccattagcctcttgaggacaggaatgattctttgtcagcctggagtcccacaaaagcacacagatcattgcttggggaggaaatgtctgcatcagctcaatgcaaatttgtcactttgattttgttttaataaagtaccaagcctgggcatagccaggaggcactgaggcgaattgggtcttcatcccagcactttaattttgttaatgtctttgcttctcagaaaactgttccaaagccagatctccccctttgctttctttagctgtcaattatttctgagagttagagtattttttggcttgtgctgttttattacttgccatgtttattcatgtcccttttgttgcacttgctggctctctggagctcttcctggtttagcccacccttctctgctgaactgttcctcatatggagatatcgcttcatctgcacacagtaaataatcgagccatgttccatggccttctctggccgcaaactcctcctctcccagctgcgtggctccagttttctgtgagccagtgacatgattgttggcaataaatgttgcacttggtttatttactacaagtttccaatctggatggggctgctccattcaagctgcccacatgctttgttctgtgcatgttttatagagtcttcttttttcttttttctttttttactgggctcctgagaacaaaaggattcgctgggtttagcagcatagggtttgagcttcaagtcctgctggaccggcagcagctcatccatgctttggtttgcctgaactgtctccaggagtgtgacttcaggaggagacttctcatgcttagagactttccagcatgaaaccacaagccccctttctcaggtgtattgtggactcggggttagggtacaggcactgtttggggagtacatcgcagtgaccacactctgacttgtggaaatgcctcagtatactgtttaaccttagaaagtgctgtaggaaaaaaccaaaggtagcagctgaaagtgacatcgcaaccccttctagcttcatgtatagttaagcaagttccagtcccaaatgcccccgtttctgttagctgttaacaataggtcatgttacttttgggaaaccaaatacctattccgtagtcaacattttttaaatacctttttcattaagcatgaactgactccataccaaaaggcttgcacagaaaagagctcaggggtctgcaagcctcaacagagtcatggcagagagaacattctaatccattgtcacccaagtgtccatgtcagtgcacagagatgacccattgcacagatgtgacccaaacacagatgctgtcaaccacccggaggctctgcctgtggggtaaatgtaatgatgcatgccttcacgaccctgtctgcaatgaagcaccttcatgacattcatcatggtatacatggagccaagctttgacaatgactatacacaaaaagttacctccaatgccatgaaatctggctttcacaggtgcttgtttttcagtcacagtgctaggcatcaagccgaggccccggcacatgcaaggcaagtgtgctaccctcacacacaggtggtccacaggccaaggccccggcgcatgcaaggcaagtgtgctaccctcacacacaggtggtccacaggccaaggccccggcgcatgcaaggcaagtgtgctaccctcacacacaggtggtccacaggccaaagccccggcgcatgcaaggcaagtgtgctactctcacacacaggtggtccacaggccgaagccccggcgcatgcaaggcaagtgtgctaccctcccacacaggtggtccagtccaaacaggatttgaagaaagaacaaggcaacagtgtaacgtcatgatgtgacctaggaacttgttgacaataatagatccagtctggcactgagaggccagacccagtatctagacaggaaagtggcatggatatgttgatctgccattaacagaaagaaattggacagcataaaatttaaaagtcatagaccttttgacccaaggatcccacttctaagagtcagtacatgaggatacaggtgaacaacatgtccttgaatttttgtttataagtgaaagactaggtacaactcatcagaataggctaaaaagtgtcacatataatgtattatgtataatatatcatgtataaagtactatgtatattggaatactgtgtacattaggattctctagaggaacagaacttacagaatgaattatatatgtacatatgtttatatgtgttcatatatgtatatatgtatttatgcacacatatataaacatatatgcatatacattctatacatatatatacacatatattatacatgtgtatatatacatataaatgtatatacacagagagaagggatttattagaatggcttacagcagtggttcttaccctgtgggttgtgaccacatcagataatctgcatatatcagatatttacagtatggtttataacagtaccaaaattacagttatgaaataattttatgatttggagtcatcacaacatgaggaactatattaaagggttgcaacattaagaaggttgagaactactagcttataggctgtggttcaactagtttaaaattggctgtcttccaacaggaaggtccaagaatccaattgtgaggagcgggtgtggcggcagtcccaaaggcgccagggactgcagctaagttgtatgacttgcacctgacttcctcatataagccacaaacatcttgagagctgtgcaggtgtaccaggataccggtgaatccattttgatggagatatgcccctgctgccctgattagctgaagctgcgtgcctggtgaggtggcgtggcctgctgtgcatggatgggaactgagagtataaaagagtgagaggcccagggttcgggggagatataaacaagtgagatataaacaagggagatataaacaagaagaaacaggactgaataaatgtgtgcagaaggatcctgttgcagcgtcgttcttcctggccagttgggtgcgcgcaagaagtggtgccgaaatccgggacaagaaacatcttcaggcacgagcgaagaccccctgctacagggaggattcagaactgcatcacggggaaggagcggttaataaaggttcccataaaacagactgttgagaaggattcggcgtggattcagaactcttcagctggggaacggtactgatgaagagaaagaagaaagatgaagacggaataaactgctgttagaaggactggtggtcgtgttgttcttgctggtcgagagtggacgcgacatccaatagtagtttggtccatgaggctggatgtctcagctggtcttagatatacaatggaatcatgaagtaggttcgaatgctactgaaggaatgaactggccaatgagagcaagctttcttcttcctttcctttatataggctgccagcagacagtatggcctacattaaaggtggatcttcctgcttcaaagatctagtttagaattgggtctttccacttaaatgtcttaagaaaaatacccttcacaggtatgcccagccacttgggtattagttaattccagattagtgaagttgaaagcaagaatagctaccatactatcctttggagtaaaagattgaagtagcacttcacatgttaaaatatgtaatatgggaaagaagcaggacatatggtggtattcctgtttgctttttaatgtaatattttaatatccgaaaatatcatacacacataacacatgttttgatcacttatctccttcccctaacttctcttgaattatgccctaccccctccaaccccatgttccccctctttgtttctcatagcccaccaagtcctgtttgtgttgcacatatgtacatggctgtgtggacctccactggagtatggtcagtctaccaggggacacacccttacattatctctgtcccatatgagccatcagcttgcccatggtccctcagctaggggtggccactggtgagcctttacctgattcatgttggaatgttgcctggcttgatcgtgtgcaggcagccacagctgctatgagcttatgagtgcagtggtgctatcatgtccaagtgttttggtctattcttcccgagcttctggctttcccgatctgtctgccccctcttccaagatgacttctgagctctgtagagaggggaatgctattagatgtccactgtatcactgagtaccccatgatcacttaatgtctgcactttgaccacttgtgaaattctaggtcaactgccatctgggtcaactgcacaaagaatctctgatgacttctgagagctgtgcttatctgtgagtatagagatataaagttagagggcagtttgtcactaagctcatttaataaaatagtagtagtaggtttaccctttgggcctatgagctccccaaacatggggtcttgaccagatttacagcaccaggcatgtgtttttggctctcaacagctcttaagtccaatcatagagcattctgttctcccctgacattcatgtgactgtcgcacccatgggcatgcctcgtcatgcaagtcattgttgtcactcaaaatgttcccagctgggtaaggctgtggacttttcttcaccagtggcctgcagagagcaccttccagtattgtgtaagcctgtagtgggaagcttccttgtcagtaccagcttgagttttccatgtcctataccagatttgcattcttaaatggaagaagaaatacatatgtgcctaatacacagaaaatttatggagggtgacttcaagaaaggggttccaggaggggggtgtgatacatgtcctcttactttgtgggcgtttttttgttttgttttgttttttgctaccttttatttttaattgaaaaaaaaaaacaaaaacctagctttaggaactgggaagatggcatagtgggcaaagtccttgatatggaagcttggtgacctgagtttcgatcctcaacacttaaaaaaaggtgaggcacagtgacctatatctttaaccctagcacggaaggaatagaaacagatcctttgggcctcactggttagctaatccagccttatcagtgagctccaagttcatcaagaagccctttctcaaataataaggtggatcagattgagcagggcagccagtgttgacctctagccactgcatgtgcatatacagacaccacccagacacaaactaaagcctaccataaagaaagataaaaatcacttccgttgactggaggttaacagtacagtcattgagacagacctcagcaaagttatgaagggaggaattcactttccagtcagctgcatcttcccacatgaggtcactgtaattgtccacagagaaaacccacaagaaagccagattgtctaacccagcacacacagtttttgcttcataaaagtagtgcacactgctgacacttatttctgcttcactggtctgggtggctaggttgttccagatgaatgttaggatccactgcagagcaactacaatctgaatagatgccacaggcatctggctttctgccttcttcctaggcatcatggcctttctaggctctttgatccccaggttcctgctgttggggcctcatgggtaacttttgtctccctacagacttgcatgttaggctcaggagaattaggggtgcctgtggctagcaagcctttgccacccctgcttcacaatgtcctgggcagcctactctgctgtgttgtgcatccgtgaagccatcacttgaagactgtgccacctggtaacagttgccagctctgggtggggcttaccattatctatcatcctaagtcaaaattgcatggcagaaaccaatccagagaatacagggattctagcaattgagtccacagcctctcttctcctttacaaaggaagctaccccccactccacaagttttaagcagatggacttgcctccctcctccagctttgccttgggctgagtgtcctgctgccaagcctgcagggccacaaaggcagaacagaatgtgtttgaagaagaggtctcttgcatttcaaagtgctctctatcttcttgtcttcttcccaagacaagattctgggcttagaccgagtgtctgtggtgacaaaatgctactgtctttgcctgtgtgctgctgggagcccctatgccattttgcttagctcttgcttggctcaatcatttcaaccagctacttaattcacatgttcctgcaggtgctcttcagcagtctctcagggttagcatgttgacttaaagagaatagctatgctttccctttttataggcgcttaaggctatctatccccagttcccagtaactgtgagtgtccaaccggataggtcccctaagaccttcctctgtcgtgagcacacagctcctgggcactctcactcatgtggagaacccctcccctggtgtgcccctgtctggacactggttcaaactgccaggctgacacagagaaatcagcatggccagaagatgcctgcactttagctcaatgtagtcacctaggggtggcagctgccaggtgactctcttccatttgctcatggatggaggaagagagtttgactcttgcaatgagaagaagacatgagggagagggaaatgggaaggtattagccccatctgggtgtttttaccttgctttccctctgtgtgctgaaacagcacctcaaacacatcctcttaaatgagaagtgactgtcgcactagtgataagtattgttgaggagatggcaatccacagtacccacagcagagtgcatctataaatctgtagaagcaggagcaggagattccctggggcatgttggccagcccacctaaccaaatcagcaggttcaatgagagaccttgctaaacagaaataaagtagagcatggttgaggggaaattcaataacaacctctggcctctgcatgtgtgcacccacaaagagtaactctaactgcaagagccttgttggggacaggtttacataagtatcaccaaagttcagatgcttttctgggccctgtacattcacttgggactttatttggtggcaactatggaaatttccacaccataaagtccattgccataaaagacactagtagctttctgttgacagttccagaaagggagtcctaggaccatctggagctatttgctagggttgaggcagaaggtggtaaaccatggtactgcatcccaagagtcattccttcatatatcctatgagagaaggaggtcatgttatgctgtggccatcggggtcacaggacactcactcagaaatatcagaggtctagggttgcgaggagcttccaatgtgtccagcaagaccctacatgcactcttacattaatagccttttatttaatcacctcaacaaaccataggaccaaccacagctggtggcagagctcatagagaaatgaagaaagagccattgctgaggtgagggtatttaccccgtctcctgnnnnnnnnnnnnnnnnnnnnnnnnnnnnnnnnnnnnnnnnnnnnnnnnnnnnnnnnnnnnnnnnnnnnnnnnnnnnnnnnnnnnnnnnnnnnnnnnnnnnnnnnnnnnnnnnnnnnnnnnnnnnnnnnnnnnnnnnnnnnnnnnnnnnnnnnnnnnnnnnnnnnnnnnnnnnnnnnnnnnnnnnnnnnnnnnnnnnnnnnnnnnnnnnnnnnnnnnnnnnnnnnnnnnnnnnnnnnnnnnnnnnnnnnnnnnnnnnnnnnntgtgaggtttcgtttgggccttttacactcagaactctgcagtctggatgacatccaatcattgtctgacacttgcccatttcctaaggaccatctccagttggtgccaacacagcccgcagcaatcccttaagtcattttcatgtctgctcaagtccattgacatccttggaataatgtcttaaatagacagaagacaaaataagacagaaaagatagacatacgcaaacagcgcactgagtctggagctcacaagctaattcgcccctcctcatgcctcacagcccatcttatttctccttgagaacagtcattcgtgtgcgacagttctcccaggccacaccaccctatccagatcgcagatcaggaagcttgagtggaaatagttattgctcaggctgaggatgcatttcagccaccctttccttcctgcccccagcctacccctctctgctttctcctggggaaagag

SEQ ID NO: 790 - DNA, 3139 bp, Mus musculus
cggggcctaggccggagcgctgcgcccgcgggctgacctcgttgaagtcgacccatgacgtcaccccgccgtgacgcgtacgcagtaggaaaactaatattttaggaaagctactcttcgggtcatatacatcataatgcggaattcttcatcagtaccaccaaaagatcaaggtgaatcaaacatccgttctggaacaacacagagtgggaaaacattacagagtaagagtcagtttaggaccattgcaccaaaagttgtacctaaggtcctaacatccagagtgcttccctgcccttcctcaatttctgaccaagggagtctgactctaatgcccaagcctctgggcatgcccacccagaactatgctctgatgcaggtggctggccaagaggggacgttttctcttgttgctttcccaaatgttgcctcagcccagccagttcagaagcccagaatgtccacacatgaaaaccttaaactgcctattcctcgataccaaccactaagtagccaaggattaagaaagaaacaggacctgagctctcccaagagtggctccagtgaccctcctggcccatcccagctatgtcatttgacctcttccccacaagcctatcctgatcctcatcacaaacctagcctgtggaagcaaatgccaactttaaacccttctcccaccaacatcaacacagctacactgaccagtggtgttggccaaggagatttgagtcctctagtgaccaacagctgtggcgatcttgagctttctgccatgccagtgtacactacagaggactcttcttcccaacagagcctcccagcaagtatgcagaaggcaggttgtgccaggaaggaggcacccactacacctgctattgctagtgaagaactcaaagaacagttagcttctgcacagactgtcttgagcagtgcagttcagttgctctctgtagtacccaagggtaaactgcccatcctgcccttaccaagagtgaaaactacagaggtgggcaaagtggaatcagatgctgataatgcagaattgtctttatctggatgcagagcaaactgtgatgagagactgtccatcacagaagggtttgatgcagccacagaaatagccagcaagatagctgctttgcatgggtctaagcagagtgcatgtgaaagtgccttctgtcctgtcaccaaattggatctcagccacaaggcaaaacccagcagtggaataaagagaagaggaagaaaatggaaagtgccagatgagattttagcattgcagggcaaaaggaggaaatgcattattggtatgtgtggagatggcatagaaagagcaagaaacagtccccaagaagccagagaccagaagcccagggttgcttcaaggaagtatcgtaacatcatgcccaagcctgtccttgtcctgtctgctttggcacccctggcgtctcatacggctgtgctgtctcaggctcccagcagcctaggtcaagatgttctgaataatgccctgccttcaaaatgtcttggctccaagcaaagtgacagctctacccctaagcccagctctgtactccgaaatggattctctggcattaaaaagccctggcacatgtgtccagtctgcaactaccactttcaattcaaacaccaccttctagaccacatgaatacacacaccaacagacggccttatagttgcgggatctgtcgcaagacctatgtgcgccccggcagcctgagtgcacatatgaaacttcaccatggtgacaaccaccccaagaaactagtgtgctgtgaattttgtgcaaaagtatttggtcatgtccgagtctatttcggccatctgaaggaggtgcacagggttgtgatcagcacagagccctcccccagtgaactgcagccaggagacacaccaaaaaacaagaacagagatcctggtatgcaaggacctgacaactcactggagagggaaaccaagtcaagtttggaagaagattttcttctaaaccaggcagatgaagtcaaattgcaaatcagatgtggccgttgtcagatcactgctcagtcttttgctgaaataaagtttcatttgcttcatgttcacggagaggaaattcaaggtcggctgcaagagatgatcctaccaggcagcagatcggatgctccccaccagaagcagtacacagagaggaggaagcaaatgaagccctatgcctctctggaggactctccagcattccctagagtgaaaagactgccagcccctcatcagaacagagaggaagccctggtaggaagtgaaggtggccagtggggaatggctggctcccagcaccccgccaagcttctctggtcccacacaggctttaactgcctgctctgtgctcagatgcttgggcggaaggaggacctgcttcttcactgggtacacaagcacaactgcgaggaccccagcagactctgggctctcctgggaaagttctctaagcagggtgctcctgagctccacagtgaatccaggctgtgatgctgaggccatccagcccaagagatgctgcaccacctttctcactgcctgtgctgctaggatttagttataaggatccagtactccagggccagggccagtgtacagaggaagtacactgtgcgtagttatattttcttaagaaataaaatatgtgccctggatgcatttttctaacatatgtagtctcactttaaaattccatgcattctccaatatcgtagactttatttaataataaataaaaagatcaaaattaggaaactgaaatgtagagaaaattgttattctcaattgcaagcctttgagtatgagtgtgtatgtatttgttttctttgtttgtgtgtgtgtgtgtatgtgtgtgacagagagtgacagagagagagagcaacagagagggaatatatgtacatgtgtccttttattttgatgctatttgattatatttattaacagttaattctacagctgtggaatatagtcccaactgtagtataaagttatatgataaatgttgatatttattagtctctggtttatttgcatatgccctagaacagtcttttgaaaaatgtactctctaccataacataaaatctgtttcaa

SEQ ID NO: 791 - protein, 809 aa, Mus musculus
YFRKATLRVIYIIMRNSSSVPPKDQGESNIRSGTTQSGKTLQSKSQFRTIAPKVVPKVLTSRVLPCPSSISDQGSLTLMPKPLGMPTQNYALMQVAGQEGTFSLVAFPNVASAQPVQKPRMSTHENLKLPIPRYQPLSSQGLRKKQDLSSPKSGSSDPPGPSQLCHLTSSPQAYPDPHHKPSLWKQMPTLNPSPTNINTATLTSGVGQGDLSPLVTNSCGDLELSAMPVYTTEDSSSQQSLPASMQKAGCARKEAPTTPAIASEELKEQLASAQTVLSSAVQLLSVVPKGKLPILPLPRVKTTEVGKVESDADNAELSLSGCRANCDERLSITEGFDAATEIASKIAALHGSKQSACESAFCPVTKLDLSHKAKPSSGIKRRGRKWKVPDEILALQGKRRKCIIGMCGDGIERARNSPQEARDQKPRVASRKYRNIMPKPVLVLSAPLASHTAVLSQAPSSLGQDVLNNALPSKCLGSKQSDSSTPKPSSVLRNGFSGIKKPWHMCPVCNYHFQFKHHLLDHMNTHTNRRPYSCGICRKTYVRPGSLSAHMKLHHGDNHPKKLVCCEFCAKVFGHVRVYFGHLKEVHRVVISTEPSPSELQPGDTPKNKNRDPGMQGPDNSLERETKSSLEEDFLLNQADEVKLQIRCGRCQITAQSFAEIKFHLLHVHGEEIQGRLQEMILPGSRSDAPHQKQYTERRKQMKPYASLEDSPAFPRVKRLPAPHQNREEALVGSEGGQWGMAGSQHPAKLLWSHTGFNCLLCAQMLGRKEDLLLHWVHKHNCEDPSRLWALLGKFSKQGAPELHSESRL

SEQ ID NO: 792 - DNA, 219882 bp, Homo sapiens
cagcctgggtaacagaatgaggccctgtctcaaaaaataaaataaaataaaataaaataaaataaaataaaataaaataaaataaaaagtaagatgctaccttctaatagagacttaggctaggtttaaaatattttttatgattctctgatttttgttgttgttgtttattcagatggagtctcgctctgtcacccaggctggagtgcaatggcacgatctcagcttactgcaacctccacctcccaggttcaaacagttctttcgcctcagtctccccagtagctgggattacagccacccgccatcatgccagactaatttttgtatttttgtagagacggggtttcatcatgttggccagactggtcttgaactcctgacctcaggtgatcagcccgtctcagcctcccaaagtgtgatttttaaatttactgttggactgaactccattgttaaacaatataaagatacataaagaaaaaagaatcattcccccagcctctctacaaactaatccctctgatgtaaatcaagttatccatctaccctattcttcatgtacctataaatgtattcatacttacattaacatacacacaaacatgcaatgtttttatcttataaaataaaatggtattatattgcacattttcttgcaacttgctttatcacttaacagtttctcatagatgatctagctggtccatagatggatatataactcattttcattttaaagaacaccataaactaagattctgatttaatttgcattaaaatagagaagttttttatcatactatatttccatccagtaacatggcataagttttcatctattaaggtttactttatattcttcaagaaaaaagatttgcatatagacactgtaattttttattaaatttttttagagttttttttcttggctgttgggaagagggctttattttccatttatatttaactactttttgtgagtatggtaaattatattatttgtcattaactactccctccttggttagaggactatacattcatgcatgttgggtataatttacaataccttcagagatgaagcatgcttcctcccccaatttgggctggccatgggatttgttttggccaatgaatgtgagtggatgtgacacaagtacatccaaacagaaactttaaatcagctctgtgatttcttttggcctcttgagcttctgctccatgacatggaaatgtccaggtaggggctacttcttcagtctagatcccagaatgagacagcttgtgaagcagacctcctactgacctcctacacagcatgaagcagtgtagcagccaactgtgaagaactgggaagggtctcatatttcgccttactttcaagccaacatgttaacttgccagtttcatggatgctgaatgaagacacttgggttagagacaaaacacttgattacagcaaaagcagtagtcagaatgtcagcatgtctgttttggttccctgagtcttcattttcagtgatgatgtgaataggcccagatggatgcctgaacaaatgctgggttgcgctacaggaaaggaatatagaacttaaattcccatgatttcatagcaagtagtgagcaagccagctctttgtcccagaggtaaaaatcacctcctccctcgaggttgcttgttgtaaacataaccctgagaaaaggctgggtaggaaatgattaggcccttgcatgcttagcacacccagcaagatgtgtaggaaaaagagtaacatatggaggagagtttcccaacaccaaccatcagccctcatgtaaagttagtgagaaataaacgtttgctcttgtaagccactgtggtatgattgttttgatacacaacaaagttgtagctagtacaaattacattatatttgtatatttatcttatatcttgccaccttacctaattctcttattttaaaacatgttctaatacagttttgtgggttttctaggtataataatgtctttgcaaataaaatgaattgccccctttcccaagcatttatattattatggtttattttgggttttttaaaccttccgggttagcctaaatcccaaaactattttgaataaaacgatgatagtaaatatgccatttattaagttattgtgtcttacttccaaagccagcctttgttactgggctggtaatgcctgggctagaacttcaaaccttatttttgctttgcaagttggctcccattaaactgtgctgatagaggtgcttcacggagctcacaggctgaaggaggaggaagaggcttgttccttcctgcatgtttttttgggggctccctatttgcctctttttcatatgagtggcatcccaccaatgcttcttcatcttggcagcagcagttccttcctgtagcaacaagtgaacccaactgacagtatttctaaatgccgtatctcccccggagatactatcagcactttctactcagaagtctgagcttcatttccaagacagcccttctccaagctcctaagctttaataaatccaacctcttttcttgatcccacccaatcacagagcagtagcagttttctgcagttcctatttctgtgatctcaagttctcttttagctacctcatgaacaatttaatacctagttaataattctttagattaaattctctctgctaaaataactggtgtagcttctgcttcctgactgacccttgactaatacagtaggtattccgacctatttcctgattctaacaatagttgctttaggtatttgccttttaacattacggttgctggttttgagtttttggctaatcactgctgaagtttatcaaatgtgtttcttgtgtatatttataaatacatatattttcctcccttaatagttaatatgataaactaaatatatctcataatgttgactcatccttatattcctggaatacataactaatagtataacacatatgtagtacttactacatatgtcctaaaactgtatacatatgtatgtatacatattcccttaataaacctatataggtttatacagtttataaatacagttataaatacagtttataaatacacttataaatacagtttataaatacacttataaatacagtttatacttataattaatgttaatgttgccaaatttgcattactaaatatttatttagaacttatattcataattaaaattgaactatacttagaattttctatcttgtactattattacttgttttctacctatctgatctcctctgttgaatttaaagattattaaaagtcaatgccttactgatatttttctcttacaaagtctatattatagtatcttgcacagagcacgtgattgataatacatgttgaatgaataaacacaggtaatagatatgaaagtaagacttttaaaaaaattagcatttattctgtaacataaaattctaatttcatacattaaaagtatttgtaaggaataaaaatacttaacgatagataaatttggtgttcaattaggtttttctgggcatatgtgttcatttcagaactcggaaatctttaaaattaatgtagatcctgtttcattaaatgtctcttcacagaatttttaaaattctccatttagttaacagcaataattgcttttgtatacttaagagttactgtattatgttttatgacacagattatatcaaaatcagttttttttccaaaagattaaagaaaaattaatagaaggtatgcatcaaggattcttaacgtataaaaccattttcaacagaatgctttttatttaagtcaaaattggatttccatggtttggggcttgagggtttctaaggttttgctcctgcagattcaagacttgtactagacatcaaaggttatcatgttgccctttcaagacactagctaaaggaattggcaactatttacaatttagctttgcttgagtccttcccttcaaagtagctatcaatatgtctttgtaattatgtttaaggacaagacatgttcttatttatttcagtgtgttttaaaaattgtattttaaggaccttctgtgaacacagcacaatactgggagacaaataagaaaagcaaaaatgtatcctctactaccaaggatcttacaatacaagggagaaaccatatgcaaacccaaattttatattagaaataacagtataggacaagtattgttttcagtcccaatgatactaaaaagaaaaatccatcaaaatggaaggaatagagtgcttatggggcactctgaaggttttttttttctatttgttttttgtagttttttgtagttgttttaattccagattctaatttcatgtgattggggaggtaataattggccatttatgatcaggataacaaagaacatttttctcatatcctcaggcatgcttggaagcagtaatgtaaacagtaataatgggaattattttacttcttattttgaaaataaaaatgtaaatatttgtttttaaacttccttacaaccctaaggtttataactgtaatgtttattataaagaaagattactatgtatcattattactggaagacagtagttttacaaagcctgggttgtaattatttgagaaaacattatttttgagtttattatatatcctaaaagtaacataaaatatattttatcagttcatttcagtttatgtacctccacctatgtggtttcaatgtgtgtgtgtgtatcatacatctgatgatgtcaaaaatctacaaaaagttctgaaaaccatgcaattttaatgaaactcatctaaactttagaagtaagtgagggtatagaactatatagtgagggtatagaactatatatatcgtgtgtgtgtgtgtgtgtgtatatatatacctatatattaggtatagtttatattactatcctttttttttttttttttttttgagacggagtcttgctgtcacccaggctggagtgcagtggtgtgatcttggctcactgcaacctccacttcctgggttcaagccattctcctgccttagcctcccgagtagctgggactacaggcatgcgccaccatgcccggctaatttttgggtgtgtgtatttttagaagagatggggtttcaccatgttggccaggctggtcttgaactcctgacctcaagtgttccgcctgcctcgtcctcccaaagtgctgggattacaggcgtgagcgaccacgccaggcctactatcctatatttttaatcccagtttttacttttcttctctgtatagatccttcttatcattggttttcttggatgacgatttaatgacaaggaaaaaagaaatacatatagtttgcaggttgctaagggacacaaacatctattttagggaattaaaatggcaacttgggggaattttgttttctttttcattaggtttattaagaaatataagttttaccattcacatcaattatgttatatttaaaaatactagagttggcaattttaaaaatccacactttttaaaattaaagaagatgtttgcaaggaaaaaagagagaagacccaaataaacaaaatagaaacaaaaaaagagacattacaactagttatcacaggaatacaaaagatcggccaggcatggtggctcatacctgtaatcccagcactttggggggccgagacgggtggatcacgaggtcaggagtttgagaccagcctggccaacatagtgaaacccctctctactaaaaatacaaaaaaaaaaaaaaaaaaaaaaaaaaaaaaagccaggcatggtgacaggctcctgtagtcccagctacttgggaggctgaggcaggagaatcacctgaagccgggaggcggaggttgcagtgagcggaggttgcagtgagcagagattgcctcattgcactccagcttgggggacacagcaagactctgtctcaaaaaaaaaaaaaaaaagaaatacaaaagatcattagagactattatgaacaatcatgtgctacaaactggaaaacctaaaggaaatggataaattcctggatgtatacaacctaccaaaattgaatgaggaagaaatagaaaacctgagcagactgataacaagtaatgagattgaaccagtgattaaaaagtctcccaacaaagcaaagtccaggaccaatggctgcattgctgaattgtaccaaatttataaagaagagctaacctcaattatcctaaaactatttcaaaaaaactgaagggccaggcgtgatggctcatacctgtaatcccagcactttggaaggccgaggtggatggattacaaggtcaagagatcgagaccatcctggccaacatggtgaaacccagtctccactaaaaatacaaaaattagctgggcgtggtggcgggcgcctgtcgtctcagctactcagacccaggctgaggcaggagaatcacttcaacctaagaggcggaggttgcagtgagccgagattgcgccactgcactccagcctggcgacagagtgaggaggaaattctccctaactcattatctgaagccaatattactctgataccaaaaccagacaagggcacaacaataaaagaaaactgcaggccaatgtcccgaataaagatagacgcaaaaatcctcaagaaaatactagcaaactgaatccaacagtacatcaaaaacacaccacgatcaagtgggatttatcccggggatgcaaggatagttcaacatacacaaattggtaaacatgatacaacatgtcaatagaatgaaggacaaaaaccacacaatcctcagtagatgcagcaaaagcatttgagaaagcatttgataacattcaacatcccttcatgataaaaactctcaacaaattaggcataaaagaaacatacctcaatttaatgaaggccatatatgacaaacccttagctaacagcatactgaatgcgaaaaagctgaaagcctttcctctgagaactggaacaacacaaggacacccactttaaccactcctattaaacacagcatgagaagtctcaccagagcaatcaagtaagaaaaaaaaaaaaagataaaaaggcatccaaaccagaaaagaagaagtcaaattttccctctttgcagatgacataatcttatatttagaaaaacctaaatactctaccaaaaaagtcttagatctatctgataaacaaattcagtaaagttgaagcacacaaaatcaacatccaaaaatcaatagcatttctacacactaataacaaattatatgaaaaagaattaagaaggattccatttacaatagctacaaaaataataaaatacctagaaatcaatttaactaaagaggtgaaagaactttacaatggaaactacgaaacactgatgaaagaaactgaagaggacgcaaatgaatgaaacgccatcctgagctcattggtcagaagaatcaatatggttaaaatgaccatactatcaaaagcaatctatagattcaacgcaatctttatcaaaagtccaatctaatttttcacagaattagaaaaaaaatcctaaaatttgtttggaaccaaaaaagaacataaatagccaaagcaatactgagcaaaaagaacaaagctggaggcattatgctacctgacttcaaaatttctttctttcttttttttttttttttagccagagatttgcacttgttgctcaggctggagtgcaatggcacaatctcagcttactgcaacctctacctcccaggttcaagcgattctcctgcctcagcctcccaagtagctgggattataggtacgcatccccatgcccagctaattttgtattttcctagtagaaacaaggtttcaccatgttggtcaggctggtctcgaactcctgacctcaagtgatccacccatctcggcctcccaaagtgctgggattacaggcatgagccactgtgcctagcccaaaacatatttcaaggctatagtaaccaaaactgcatagtactcacataaaacagacacacagacaaatggaacagaatagacaacccagaaataaatctacatatttacagtcaattgattttcaacaaaggtgccaagaacgtactttggggaaaggacacctttttcaataagtggtgctgggaaaattgggtatctatatgcagaagaatgaaactagacctgtatttctcactatatacaaaaatcatctcaagatgggttaaaaatgtaaacgtaaaacctgaaacgataaaactattagaagaaaacagggtaaacacactaggacattggtctaggcaaagatttcatgctaagacctcaaaagcacaggcaacaaaactaaaaataggcaaattaaactacataaaactaaaaagcttttgtacagcaaaggaaacaataagcagaatgaagaaacaaaaatgggagaaaatatttgcatatttctccctattcatctgcactattcatctgacaagggactaatgtcgagaatatacaaagtactcaaacgcaacagcaggaaaaaaacaagtaataccatttaaaaatgggctaaggacaagaatagacatttctcaaaagaagacatacaaatggccaacgagtttgtgaaaaaatgttcaatatcactaatcatcagggaaatgcaaatcaaaaccacaatgaaatatcgtcttaccccagttagaatggctatcatcaaaaagacaaaaaataacagacaaactggcaaggatatatagaatagggagctcagacactgttgatgggaatgtaaattagtacagccattatggaaaacagtacagagacttctcaaaaacaaacaaacaaaaaaatggaactaccatgagatctaacaaacccactaatgggtatttatacaaaggaaagggagtcagtatatcaaagggatacctgcacccccgtatttattgcagcactgttcacaatagcaaaaaatatagaatcaactgaagtgttcatcaacagatgaatgggtaaataaaatggaatactattcacacaatggaatactattcagccataaagaatgaaattctgtcatttgcagcaatagggatggaactggaggtcattatgttaagtgaaataagccaggcacagaaagataaatatcacatgttctcactcatatgtggaagctaaaacagttaatctcatggaggtggagagtaaaatgatagttaccggaggctgggaagggtgtgggatgggagggatgaagagaggttggttaatgggtatgaacatacagttagatagaaggaataagttctgatgttacatagcagagtcaaatgactatagttaacaacaatgtattgcatatttcaaaacagctagaagagaaggcttgaaatgttaccaacacaaagaaataataaatactggaggtgaggaataccctaaacaccctgactggataattgcatattctatgcatgtaacaaaataccacatgtgccccataagtatgtacaaatattatgtatcaataaaaaattaattaaaaaaaagaaaaagaagaagtttgttcaaagttttcttactagctctctggaatgccaaccaaaggatgaaaacgtaaaacatacacttattgttaatatgttgttaaaagcccctttaatgtatggcttagggactgctcagttttctctacagtttattttttcatttttaaaatttactagtttgattttttgttgattgttcaaaaaatgttatttttgcatacaaaaaatgtatagatgaaaggaagaaaattatatcaaataaatagtaaaaaattactttggatgctttgctagttttaaaatggaagttgatacttcagagctgtcaaggttttttgtgttttgtgtgtttttatcaaaatctcagatttcattagaactattgaaatttgaagatggtcctgaatggaaaaagatggaagacaaaggtgaaatcaactaatggagaaactttagcaaatgtctcagttccacaacaacatctttcctgtttcgaaaatgagtctttgcaggtgtgtttcctatcttgctttcttgctcaagaagaatgtttatcattttctgaatttaccagcaattggtgtgtgctgagggctcatttattacaaaatgtcgctaactcactcctgtcctcttaaatttaaaacagctgctacccactgccaggatttaaatcttcacagacagatttccagactctctgtatgcctgtattacatttttgttaataataatctctgttcatcaaggtgacaaggggacattgtgcttctacgcacatattttctctgtccatatataaaaaactaaagctttcattttgttaatacaaagccatgatttaacgttttaaaaaaaccactgattgttggtgccatttgaagcactacagtttagttttgcttcaagaatcataacttccaacattgttcccttcccatggaattattttttttaatattatctctgaattagaatagctcatttactgagtgaaagtagcagagggatcccaactaaatgttaaaagacagagcaggccgggtgtgatggctcacacctgtaatcccagcactttgggaggccgaggccggtagatcacgaggtcaacagattgagaccatcctggccaacatggtgaaaccctgtctctactaaaaatacaaaaaattagctgggcatggtggcgggtgcctgtactcccagctacttgggaggctgaggcaggagaatcacttgaacccgggaggtggaggttgcagtgaaccgagattgcaccactgcactccagcctggcaacagagcaagactctatctcaaaaaaaaaaaaaaaagacatcaaatttggaaaaagaaacttatgctgtaattttaaattggattataattttgtttttcagattaaattttcacaatttggaatttacagtcttgtcaacattcatttgtaaagaaagtataattttgaactttttcaatgaccacttcactgtcttaaaatatatgaaaatatgggccaggcatggtggctcaagcctgtaatcccagcactttgggaggccgaggcgggtggatcatgaggtcaggagatcgagaccatcctggctaacacagtgaaaccccgtctctactaaaaatacaaaaaattagccaggcctggtggcgggcgcctgtagtcccagctactcgggaggctgaggcaggagaatggtgtgaacccgggaggcagagcttgcagtgagctgagatcatgccactgcactccagcctgggcaacagagcgagactccgtctcaaaaaaaaaagaaaaaaaaaagatatatatatgaaaatattaattttgacataatcactaaattcttggattttcaaagatatcattttcattttactttgttttttacattgttaccttatcagaaagaaataattttgtttcttcccattagagttccttctggaacaactgttcaatttctataaagagagagcaatctgttttgaaagatgctaaagattacgttcatgcataagataaatcactgagacagtaaaagattcaaaaggtacttcatgttctaccagagtgaaatccaaatcattcttctccacagtgaattcatggtttcatgcaagataagatctcatcctgttaaggaccttatctttgaagaaaaaagaacataatttctcaagggaactccagtatcgtaattcacaaaatcaaagatattaatatacacaacttttattttaaaatagtcatccaaggctttggaacctagagtataaagtatggatggtaaattgtaatactgcataataaaataaatatggagaagtgaaaaaataattctaattacttaaaagttttcattctgatgaataaaattaaaatgcccagtaatccttaattaatacatttagaatcccttccttagtgatgagaattaattttgcaatttaatttgacactttacggtgtgaaaaagaaagataaaaaaataagcctcttgggaatggaaagaaaatttccagtctctcaccagccaacccaatttaatcaggtctttctcttattttttctgaaatcattcatgtttccacacctagccctttccattccctgtgttttataaacagaactagctttaaagatctggggtttggatttcattttgtcttgaaatgtatacttagatttgctgctggtcaacatggtagtccatcatctcaaagattttttaaaaatagactctaaaagaagatacatggtattctagatataagataccaggaactaagtacggcacaaatttccaaatgtttaatacttttaacagtgtccagcttatcctggtgtttattcattcattattcatgcatttattcattcattcaccaaaattatattgagaatctacaatgcacagaagagagcatagggccaacgatataaactctacctagaggcactcatggcttagtaggagggtcaggtacataaataagtttcaattttagatggtattacaaattatacaaagagttgtatggtgctatggggaaaaatgagaagacctcccagagcaggtgacacctgattcaagcctttaagaaagaacagaaggataagcagaaggtgggaaatttatccttggcagacagaagaccatatgcaaagaaatggggatcagggatttggggatgcagatatgaggttgcctgaaggacagagtcatggtgacagaggaagctgaggagagagagagaaggattggagccaaactttctgtgccaaattaaggacttaatactttagtctgttcgcaaagggttttaagcggagaaatgacataaccagctttaagattacagcaggtcagactccctaagaaacggtctctgaaactctgtgatttgcatgccggaattcatatggggaataattttggggacaatatctgtaaggaagcgaagagaagcagggagggaagaagaaacactgggctgccatgcaatatatatgttttttttttttcctggttcccattccccgtccttggggttgtatacaaacccataaacaatggggaagagcctctggtctttggtgctggtggctgccacgcctggtcatcctagcccacaggcccatgtagtccattcacagacctgaagtctcatgcctctgagtcagatctggcctcaggattgtctgtccagaatcctaacctgggctttctgaagtccagctctcctgggcacacatacttcttatggttctgtatacaagtgagtcattgacaaaacctgcagtgtgtgtgaacccactggtaactcatttttttgagacagggtctcactctgtcgctaatttttaacaaattatttttctagagaggagatctggctacattggctatgctggtctccaattcctggcctcaagtgatcctcctaccttagccttccaatgtgctgggattatgggcatgagccactgcacccagacatgcaatggttcttcaagtatggatcctggaccaacagcagcacctgagaaatgcttttaaagtttgtcaggtagccctaatttactgtttttatatctagaatctccaccttacaatcttgttaacaacctccacctcctgggcttaagcaattctcctgcctcagcctcctgagtagctgggattacaggcacacgccaccacacatggctaatttttatattttgagtagagacggggtttcaccatgttggccaggctggtctcgaactcctgacctcaaataatccacctccctcagccgcccaaagtcctaggattacatgtgtgagccaccacatccagcctaaactctactaaaagtaagtttctagttaattcttaagagaaattaccaatctaatctctcaactagctgagaaaggattcttggagcaggtagaatttaaggagttcaagggcagaatcttctgacccttctccttcctacaggctgggggatcaccagagctaggctgaaatcctggtgattttgggaatgtagatcatgcatgaccaagcaacaggatggaaggagcctgaggcccaggcctcaccctgggcaaactgatcctggaccacctatatccagacattcttaaataaaataagcttgaatcatcttgtttaggcctgttgtcttagtgttctctcattcactaagaagttatcccaactaacattaataataccaatagtagcacatattgtatgactaggcaagagactctcaccataataacagaagaattagatacccacattctgtgcagccttggagttcagttttaaatgtaatcagaaagtgactgctattaccatttgtggcataaaataaaatgtgaacatgatagctaacaaacattcacctcccttctctcatgtgttatgtgagaagagagggccccagggaaagaaacacatgggactcttagctaggtaggactgtgtgttctgtgagtgccatcaacacaacattatacatgcagggccacactggaaacccaatttcctattttacacttcaactttattaagtatttttctcttttgtttaaatagcaaaagttgacaccttaacaggtaattcctaatgcacaaaaagttccttctccagaagatagatataaaaattgtgaaaaatctattcataggggcaaatgtaactattaaaaatcatgaattcatgtacaacattaatgaatttctgggcaaagctgttcattttgcaggttttatgatcattcttaagctggaggcttaaatgatcaagctcttcacttaagagtcatcataaactcaagggccttcaggagccaggcagataggttaaataatacccagttggggttacaggaaaatgtggaacatctgtgcctttgaaccaggcagcctcattccaataataaatgccctgagtgagtgggggaacaacactgtcagagcttctgatttttcagaaaaagccaaaatacttgtgatatggttaggttttgtgttcctacccaaatcttatcttgaattataatccccatgtgtcaagggagagaccaggtagaggtaatggaatcatggggacagtttccctcatgctgtcctcctgatagtgggtgagttctcacgagatctgatggttttataaagggctcttccccttcgttcagcacttcttcctgctgcttatgaagaaggttcttgcttccccttctctttctgccatgactgtaagttttctgaggcctccccagccatgcagaactgtgagtcaattaagcctctttcctttatacattacccagtctcaggcagttctttatagcatcctgaaaatgtactaatacaacttgctttttaaatgtgttttctgatattcatttcaaaatttaaaaaacacaatatgaatcagaccaaacacctctgagagctgagtgccaccttccacttaaactctaaatgcaattagacttgagtttgcaaaatcagattttaaaattttactttgtcattaatataactgccttaatggattaaaaatggcctgaaccaaacatgaaggatggaaaataaatgacaatttgtcaagcagagaaggaacctgctgaattaattgccaaggggagaaattacaggcctttagaggcagatagaacttaactgggataaacttcagagaagttgtgactttgttttcacaggccattaaggtcttggggacatccatgagttttggcgacaacagtaatgacttttgactcctagattctacccacccatcaccccattgggtggatgaccttccttcttcaactggattaaagaaatttgtaaaattcctttttattgtgccagaaactgtgcttggtattaagaacacaaagttgagtaaatcggtgtctgtcttcaaaggattcatagctgagggggggcaaaagaagcataaacaattataatatgtgttactcaatctaaggtgctaccaattataagaaaccattagttttttttacctcctaaaattaaactatgatattcttcaatttcaagatgaattctaatttcagagatacttcaatgttaaaaaaataagtgtgtttaagtgaagaaatactgtatgcgttataggagaagttgtgttgaagaacagggagaagaaatgatctgaccacctgggcaaagcagggagatacagtaaagtttgtaagggggagtcagattactttaagcaatgtaactatcttagtacgcttgggctgaggcttaaacaatggaatttattttcttacagttctagaggctgaaaagttcaatatcaatcaagatcttgcagatttggttccttgctgaaggccttcttcctggcttgcagatgagtgccttctcactgtgtcctcacattgtggcgagagagaactctgcttcctctttttcttataagaacaccaatcctattggattagggcctcgtccttatgaccttatttaatctcacctccttagttcatttgtcttactataataaaatactataggtaatttataaacaaatttacttagacacagttctggaggctgggaagtctaagatcaaggcagcagcagactgccttgtctggtgagggctgctctctgcttccaagatggtgccatgatgttgcatcctccagaggggagaaacactgtgtcctcacatggcagacaagaaaggatgaactccctctatcatgccttttgataaggcacctaatcccattcacaagggctccaccctcatgacttaatcatctcctaaaggtggctcctcttaatgctattacattggttattgagtttcaacacacatttgggaggggacaccaatatctaaagcataggaccttctaaaaactctgtctccaaatccagtcacactgggagttaggacttcaacacacaaactggggggttgggggcagaagagacaccattcagtccacagcagtgacccatggctttgggtctcacttttttccctcatatgcaaaataagataataatagtagctacctcatagagttgtgaagattaaaagatttcatatggagtgctctgtgacgtcttagatctagtaccagtttagtaaaggctggctgttatcagcagaggtaattaatgatagaatttgaactccaagaatcagtagaccttcgccaagggctaagaaagcaagcagattccagggaagaacagaatgcctaaaggactgtttctggaacattctgcctgtctgctatgatgtcttgatgtagttggcgaggtttttttcccttgaggaattaaaaatctttttttttttttttttgagacaaagtgtcactctgtcacccaggctggagtgcagtggcataattatggctcactgcaacttcaaccttcctaggttcaagtgatcctcctgcctccaccttccaagtaactggaaccacaggtgcacaccatcatgcccggctaatttttgtattttttgtagagatggggtttgcccaggctggtcttgaactcccggtctcaagctatctgcctgcctaggactctcaaagtgctgggattacaggcatgatcaccgtgcctggccagaaatctttttggtatcttttctcctgtaccttcttccctgttctccaatcccaatacacgcacaaggacagtttggttctttccgttttacagtcagaagcatgctccaggccctgtactcaaatcaagaactgggcttctcagaacaaggacacaggttccttgtctttccatttccctcctcgcttccctccaccccttcttgttggggacagcctttgtctaacatcctttgtttaagagaattaattgctatcccccagtggctgtcagtgtctttcaggagacctcatgtaaataaggctccaggtggcctgctctgatttccgagttaccagagggataacatcctgttaggacattcatcaaggataacatttagtgaggcccagagcagtgactcatgcctgtaatcccagcactctgggaggcccaggcgagaggattgcttgaggctaggagttcgagaccagtctgggaaacacagccagatgtcatctctatgaaaagtaaaaataaccagatgtggttgtgcatgcctgcagtcccagctactcaggaggttgaggtgggagaatcccttgagcctaggagttcaaggttatagtgagctatggtctttccattgtactccagcctgggcaagagcctgtctcaaaaataaataagtaatatttagtaagtctaaccccatttgaggcttgcagaagttactggacttgccataaagtacccagttaataacagagctggccctgttcagtgctttactatgttatgctgcattgccattcaaaatgacttgtctcctaaaggaattttctcatcagaattatttctattgacagtatcccctttttagaaaataactagcatcttgagtaagaaagctacccagtctttgaattcgagttcatccatccattcaccacgcattcctctacacatattaactgataatctatttgggatactacatgtagaggattcgaggttaagactcacatttcccctattctcacagagcttacagtctaggagaagaagcaattaaaataatttgcaatgcagagagccaaagctgcttagggaaggcttctcagagtcagttcctgcaaagtagagacctaaaggattggggagaattagctaagtaaaatgatgagggaagggaggtgataaaatgagatgaaatactgtgcaaactgtgtaactgcagacttgtaagactgttattaaacagacatccctccagagctctccaatctctgtcccaggtcttcttccagcaaagtctctatctctgctcctttggcagaataagcccccttttaacctgtgtaactcttgttttatagatggttattttgttgttattagtatattcttgggtttgagttggagacaagggcctatctctaatcaggagtgacctgatttttatgtcaattacctgggaagagatcatcaaaccagatcctgggacttaagagaggaatgtaaggggattgcagaatgggattttgtttcccttggtcttgatcctgaaggataaatgatgcatgttagttaggcaaggcgtggttataatagtgtttttcaaattttttttgattgaaatccatagtatgaaatacatttaacgttgcaacccagaatacacacatgtggctgaaagtttcccctaatttgtgttgggaaaaaaatacccttattacatgtgatacaatctgatattttgtattttggattctgattagtgtttttctgagtagctaccctttaaccgatcacaaaatcaacttactgggtcatgatgaccaccttaaaaaatcaaataaaagcagtcatgcaaagatgggatggaaaacagtgaagaagatacccatacactgtggtcagtattttagagctaagtccatattttggacttcctaagtccctctgtttcttgcataatttgtgcctggttgtatgaaacttgagacagattagtggttatggctgtgggttctgaagtatgaagtctggaatcttgactgtgttactcagcagctgtgtgacatgggcacttaacctacttaccttgtgtttaaaatggggatagtaacagttcttatctagttgcaagaattcaaggaaataatgcaatgcttggcacagaatcaatactcaggaaatattaggaattatatttctttcacttttattttccccatacattaagtactctgttttgtcttaattcagcttttcttagcttgctaagcaggaccaagggaagagatgtgtgtattgacatagagggctctggaagccagattgctatgggcagcagatatcaaagagaaagaatcacaagggggaactgaaagcccaagggccatagtggagggcctcagtgcttccagtgctaaacctccaaggtccagggttttattttctttaaaaaagcagatcctctctttaataacaacacttttggccctagcttctcacttcctgtctaggtcaaattccagtttgttacagaaagttgactgaacgtgagtggtattttcccacaaatttctacttgacattccttgagactgtgatccttgcttgggtacctttactgttggccatcttttgttcactgcgtttacttttttcctgcatctagcaaaacaacgacttttttttttgaatacctgagatttcaagagaaagtatactgaacaatacgatgagaagactatattctacaatgccatctttcagaggcaaaagtatctatagtaaaaacatttgatacatttggtgtatgcttcttacccatttccactccaaaaaataacagatgacatgtacctgtgaaacactcccataaggtatacctagaaactcacttaaaaaaattacgatttttagaaatgatatatataaaacattttataagcatgtaaactattaacaatttaaaggtttcttaaaattgttttgcaaggaaaaacataaatatcactgttttaaaaatatgcaggactttaaaaaatgttaatttttctatacctctgctctacagaaaaaccttattgttacaattatggtacagcctttacaaatttcttttacatcatttgataataactaatattcagataaaatatacaaatattttttcaaatcagaacatttaaaaacactgacgtagatttttctggaataataaacgtttttatttttaaccagctcagatctcgaattaaagcctaatattcccatcatcactctttcctgtaaaaataagacagcactttcaatgagagtggaaataaaccattgtttcaggttttacttacaactggagctgccttgcaaaatccctgccctggccatctgccgtggttccaaataagtttgtaaaagtgaatcttgccattttcaatacttcctcctttgggtctatttattccgaagtctgtttttctcattcttttaatttttttccccccaagacggatttgtctgagacacttttttgccataacatttgttttttctgcttacgagagtgtaagaattccacaagccaaatgttaatattttgttgtcagttctttaagccttcattttttccgtctatcgagcccttttttttaaccagaactcattgcttctgagagtataaaagagcaaagaggccgggcgcggcggctcacacctgtaatcccagcaccttgagaggccgaggcgggcggatcacgaggtcaagagatggagaccatcctggccaacatggtgaaaccctgtctctactaaaacataaaaattagccggctgtggtggcgcgcgcctgtaatcccagctactcaggaggctgaggcaagaaaatcgtttgaacccgggaggcagggggtactgtgagttgagatcgcgccactgcactccagcctgggagacagagaaacactctgtctcaaaaaaaaaaaaaaaaaaaagtggggagcagagagccggacttggacacgggaaggtatcgtgacatgagtgggtcgggggctggaaagtttgcccaggcgaagaagtgaacatgtttatccggatcaccgtttgttaaatgaacagcaacccataggtagcttcaccgagccgaaacgggaaaggcggcaggcaagggagaagctaaaatctgcaagaaacgggctgggctggaggcggcgccagggcaagaagggcaggtgggggcccgcgggagccgggagccaggggcgggagccggaagggcgggacccaggggcaaggcctaagtgggcgtgggaggggcatagtcaagagatgggcggggactgctcggggtctgggcggagtctagcgggagccgcgtcgagccggggaggagcgagggaccctgggagagctgtcttttcagggctgaggacccgccagcacctgatggagagcaaatggctgtttccacacgtggagaacttttaacgaacacgtgaggaaggcgggcaatgtctgtggaaaaactacctcacaacccaggcgtcttactccagcccccagggcgacagcttgtttacagtatttctgaaggtctccgtccccttttgtcggcccctcctcctcctctaaccccgacttcaggctttgagtgaggctttggtagagcagtcgccgccgcaggcgccccggtcggcgaagcccacaggcatgcgggcgcagaggccgtctgcgcctgcgcggggtgtctgctacggggaggtgcgtggagctcgagggcgtggagctcgggggcgtgtctcccgccgcggcgccggggcggggcgagggcggagcctgggggcccagcggcccgcgccccgtggcttgacctccccgactgctgggcccgtgacgtcaccccgctgtgacgcgcacgctgtaggaaaactgtaagtttacgaggattcctgcagctcctagggcttgcggggcccgctggcagctggcagtcccggcggtggtggtggctctgggggcgtcagttccttggggagtcgccgattgtggcgaagggacaggtgtctgctcagagtggcagcgcgccctgctgggcggtagggacctggggtgcgggaggcgaggccgcgccccgtggggccgggccagcaccttttcccctggggcggggcgcgtctccgagcctgggagcgaggccttagaaggggcggaaagtccaaatggagagtccctttttttcttccgtgataaagggacttagattccttttcttccccctctcagccttggagtttgacatgttaagtaggggatggaagcttcctctcagagaataggaatcctatgtcctggccgttgggatcccacaagtgaccaagtcatcgtggacacatttataagataaccagttgctgcctcagttttcttttttgtgtaaaagggaggtacagcagcctctggcctccctaatggttgttcccacagcactaggaacacgtgagataacacaagtgtgtaaatttgctaggagaaagcttatacacagacacttggttattctgaggaatgtggtagccactggctatttgaccaggaatcttgtagaaggggaactttttcactgttttgcctccccccgacaaccttccctccatctgattctataccacactggagcctgttgggtgatcgaactgttgtcactaaacttgatagaatggggatcccaagaaataacaggtatcgttagcacggtactcttggcaattacaatgcccccgttgtctgggttttgcagaggaagctttcagtgtgctggaactagcacattatagacaacacagactcactgagttttaaggattgctgtatcgatttggaatatccaatcatcgtatctgactgcttgaatattttggtcaaggggtactacattatcgattagttattactagactataatgcctctcaaactccgggactagtagtcttcaggaactttgaagggaagaatactgtgcacacttcagggtgtatttatacaggagctcgagagttcacatttctgtaaattcatttcaggagtgtgatatcttttcatccaggtaggaagagcctttgaatcagaaagcagggcttctaatttttgttctattcgttaactagcttcgtgtccaaggacaagtcacgcaaacttggaactttgtttttcttatctaaaatgagagccgatggtttatctgtttgttggtttttccaggatcaaatgagatcacgagagtgcaaatgaaaggctaagtgtgctattgttattaggagattcgcattggtcccctagcctggatgagatgtgagtcagaaatctctggaaatagagcagcaaagaagacagcctccaacctagcagggctcatattgcagtgggaaatagacaacgaacaatacgtgcataatgtaatttcaggtagtcataagtgcagtgaagggaaggaagaaaggaggacagtgggggaacagggaaggttgtttttggtgggatctgtcaggaaaagccattcaaaggcagggacacttgaagtgtgagggaaagagcctgaggtaagaacatttcagagaggaataattaatagcaatgaacacttaaaaaaagtagagcttaccatatgtaaggcactattctgaacactaaattaaatttttacaagtcttttgatgtaacctagtatctccctttcatagatgaggcaactgacacacagaaaggttaagaatttgccaaagttgcacagctaaaacgtggtagagactatttgaacgtgggcagtctgacttcagagtccaggctccaggtgactgtattttcggcctcacagcaggaacagcacaggacaatgctctgaggtggtccagacacagtgagagtgtttagagcacagccgggaacggggaaagtagtggccaatgatggtcaagggccaggcaggccgtggggtcccttgtaggctgtggtgaagtaaagatgttgttctaactgtgatggaaaaccattggaaggtttgcatcaagggactggtgtctgatttaagttttattgtatggagaattaactgtagattagagtgggtcggatggagtgaaaatcgggagaaagctgctgtgccctgcaggtgaaatgatggtggtttgggctgggggaggttagttgtggagatgatggtaggcggtagaattggtgatacgttttgaaggtagagctgacgggaaacgagctgatgtggaatttgaagaaaagggagaagtgatgattttttaggtttaggctggaacaactagaagtatagtggtgctgtttactgaggaaaattacaaatttagttttgcacaagttctaaatgcctgttagacatagtcataacaacagtgctagtaaaaatagtattatgtaagcgtaaactgagtcccaggcagggttttaagtactttaacctatattaattcatttaatcatcataagaattatatgtgcaaggaaccattattgtccccattttacagcacgagaaaatagaggcaaaaagaggttataagtgacttgtctgaagtcacccagctggtgagtgatgtagctaggattcaaacctaagcattgtggctttggagtccatgcattgaatccctgtaaccacctccgagtgaacatgttgagtatgcatgcctgtgaatatggaactcaggggagtggtcagggttggagatacccatttatttttctgaagagaaagcatgcttttgtttttcatctaagctttggttgtctgtgggagaaagattataggcagtgggactgtgctaactggtctttgattacgacctgactgggttcatgcagccagtatctggtattccccactgtaggttccgtaggggcaaggtctgtctctttgacttctctatctctagtccctaatccagtgcctgctgtgtagtagatgttagggatgactttatataatgggcatttggttaggttttggaagttcagagatgaataaaacagttctttaccttagaggagcagggtatgaggaaaaacctgtgggaataaaattagagtagactaaatgcataaatacatgccgattagttcatttgggttttctgcaccctcccctccccagcttccatgacttgtgagatggggcatgaaaagggcaaaggggcaaaagaatgcctaagctgttgcaggatgaagttgaggctccccaagagtccttttcaacaaaagaattactcaaaatcatgcatattttactatatttgcattagctttatttggcaatgatagaatttttaccaaatgaaataaattctgatatttgactgtccttttgaagtgatgagtttttccagttctattacctcagtgttgacagggctcaccagagaaataagggagttggcttgaaatgttgcagcttgcataatagagggtgatggaggggttgggtgaagtattcaggcaggtttccaccggtttaagtgtgtcatgccaaagttccacctattggaataagtttgagtttctttgctgaccatctctaacattgacatgtattttttttttgtcatagaaaggggatctggtgatatatattgtaggtggaattgcagattacatctcgtatagctggatcattgtagaacatggagactagaaaaatacaaacaaaaaaagatgtgtcttgttcccgtagatctttcatggcataccataacctcaacagttgtcacaattttgttacttcctaacatgagtatttcaaatttaaaccatgtaagaattatataaaattgcactgccgtagattttatggttaatttcagaatttttaaaaatatataaaattatattttgttttaagctttcattgggaaagtatctaaataaccagatctatgattactctaaacagaagccctctactaacgtaaatgtagaggggtgccatctcattttgcagttcacaacgttttaaatctgctcttgtagcttccctacatttaatggagttgaaatgattagtctttatttacaccacatttgcagttagtttcccaggaacatcagatacccatatatggtataaagtaaaattgcatagtcaatagcctattgatgctcaggtgttattgacttttaagttcaggcacagtgagggcaggttgatggttatttaattgtgtcaggtagctcccagcagagggggagtgatggtaagttctatctgaaaacaacaggaccctctgtttctaacactgaccatgcgaaatataacatcctagatagtaaataaaattcagattccttttaaaatttacatttgcacaagcaaattttaaactattttatgagtacttttatatatatgaagatttattgttgaaaacagtgtgtctagcccagtgatagtacatactgagcatttaaatataattctttttttaattaaatttattttttaaattatactttaagttctagggtacatgagcacaacatgcaggtttgttacatatgtatacatgtcccatgttggtgtgctgcacccattaactcgtcatttacattaggtatgtctcctaatgctatcccttccccctcccccgaccccacgacaggcactggtatgtgatggtccccaccctgtgtccaagtgttctcattgttcaattcccacctgtgagtgagaacatgtggtgtgtggttttctgtccttgtgaaagtttgctcagaatgatggtttccagcttcatccatgtctctacaaaggacatgaactcatcctttttttatggctgcatagtattccatggtgtatatgtgccacattttcttaatccagtctatcattgatggacatttgggttggttccaagtctttgctattgtgaatagtgccacaataaacatacgtgtgcatgtctctttatggcagcatgatttatagtcctttgggtatatacccagtcatgggatggctgggccaaatggtatttctagttctagatccttgaggaatcgccacactgtcttccacagtgtttgaactagtttacagtcccaccaacaatgtaaaagtgttcctatttctccacatcctctccagcacctgttgtttcctgactttttaatgatcgccaatctaactggtgtgaaatggtatctcattgtggttttgatttgcatttctctgatggccagtgatgatgagcattttttcatgtgtctgttggctgcataaatgtcttcttttgagaagtgtctgttcatatcctttgcacacttgttgatggggttgtttgattttttcttgtaaatttgtttaagttctttgtagattgtggatattagccctttgtcagatgggtagattgcaaaaattttctcccattctgtaggttgcctgttcactctttatggtagtttcttttgctgtgcagaagctctttagtttaattagatcccatttgtcagttttggcttttgttgccattgcttttggtgttttagacatgaagtccttgcccatgcctatgtcctgaatggtattgcctaggttttcttccagggtttttatggttttaggtctaacatgtaagtctttaatccatcttgaattaattttggtataaagtgtaaggaaggaatccagtttcagctttctcaatatggctagccagttttcccagcaccgtttattaaatagggaatcctttccccatttcttgtttttgtcaaaattctacttcttgcaatcacttttatttttgcattattatcttcaactcatatatatttgtagtagtagctggatgcttgtttgtgtactttacactctaaatgtttgaatatatttaaataatttatataagtagcacttatttttgcttcatttcacatttggttgcttaaaaattaaaatctttaggtttgattttaacacattacactaatggctaataattagtaagtctaggtggagactaagctttagtgacaggttaaccaagttttaaccccaaaagaacacccagaagaaaattcttagggaatagtaagcaaaaccagtatgtcgatgaaaggaataatttaaccataactacgtagctattattcttcaagttgttactattctacagggagtattttcttatttggttcttcaattgcaaagctattaatttcagtctgcattgcaagccaccaagcagtgtgaaataaatactggaagatgatactgtgaagaatctgaactcagaatgattttttactttccaacacactctggggacatttggcaatgtctagaaaacatttttggttgtcacatttgtgtgtggggacattactcctagcatctagtggattgaggccattatagcatgtcactgaatgtcccacaatgtacaagacaacttctcaacaacagaaaattatccagttcaaaatgtcagtactcctgatgttgagaaattctgtaatatcttttcttccttcactccctccttccttctgttcctccttttttatttttttatttttttgctttagaaatggaggtggtagttttaagtggcaaatgcctgacttggacaaaggattgtgttgtactgcttttagtttgttggatagctgagctaatttggttcatttactgaatgggaaataattcttggagctaataatagtagccttgaatttttttggttgctagtgtgtctagtggttttgtatttgtttttggctatgaatatttttcttactaaaattaatttaatctggactttatataatcctggattgtaacaggtttcctagtgtgaattccctttattgttgtatatgttaaattagctatttcacagtttcatggtttatatctgtcaaaatccttttcacattaattttcatttttgattgttacaaacagcccataaaatgtgtagggcatgcattatcctcactattagaccaatgaagaaacagacttaggttaaatgactttccatatgtgttaataagttagtgatgaaagcaaatctagaactttatacctaggaatctttttttttttttgagacagagtctcgctctgtcgctcaggctggagcgcagtggcgcgatcttggctcactgcaagctccgcctcccgggttcacgccattctcttgcctcagcctccctagtagctaggactgcaggcacccgccaccaagcccggctaattttttgtatttttttagtagaggcgggttttcaccgtgttagccaggatggtctcgatctcctgacctcgtgatccgcccgccttcacctcccgaagtgctaggattacaggcgtaagccactgcgctcggccgtacctaggaatcttttaaagttaccagttattgttatcccatttaatcttcttgacaatactgtgaaatagagttattactctcattttatagaaaaagaagttggtttagagatattaaataacctattcagtgccacccaactcataatgtagtttggctgtttccactgagctattctgtgtcttcagatattctccaataaataaatctgacaatttctggataaattcacagaatctttgcctaacttaattaggtttcttgacactcatgttgccacttgaatcattggtaattcagtgtttgtaagcctattctaatttgacttaagtagaaacttacctgagttttggtaaaccatacttgctgggtaggggagaaccgtgcttgcagaagacagtcctttaaacaggcagagacgtttttatgtagggttttgaggaagcacagagtttgagattggctgattttgaaaagtgcaaaaatttaaggattagccagctttaaacttagagtttagagactgaccggctttgaggagcaaaggtactgaagcggggcagttgctgattggcttactttgttggcaaagtgcttaagtggaaaggttgagtagactttaaggatggattgactggggtagatttaaaactggttttgtggttacttgtttccagcttaggactagagccaaagaacaatcttttcctttcttgaagttgaagaatacgtactttttatgtcaaacatgttgatgttagctatggcgctaatataacatacttttgattttgcttttcttctgaaacttaaaagaaaaatggatgtacaaatatcacttgttttctgtctatcaatttcaggacaatatatttggaacccaggctgcctcaaggattatttttatatgtagttcaagaggtaatatattatttgtggaaatatattaatgctttaaaaattatggtgaaggctgtgctgtctatggtgaaggttatgtctattttttttctcttttgggagtgtgttatattatgtgcctgccacaattagtcttgatagatgccgaattatagatctagaagtctgttgtttttgctgttattagagatacatctagaagtgattactttttgaatgttacttggaaagtattctgatcaacattatgaaagattagtgattatattacatatattttatagaacaaggcaagcaaaatattttagtatttgcaaatcatgttactataattattagatcatagtaccatttatataaagtattaggttggtgcaaaagtaattgcggttttggaccgtgaattttaaatcattataagtcggctcagacacgtctttattaatcagagcaggaagcattataatcaacacatttttgccaatgagaaataagtttgttcattcctgtagcttaaaaattcatgctttgggatttggaaagcattttctgctttccaaaaacctgctggttttggaagcattttcctttcaaatagttgtcgagatgcttgaagaagtggtggttgacaagaggtcaggtgaatatggcggatgaggcaaacttcatagctcaatgcattcagctttcgaagcgtttgttgtgtgtcgtgcggttgggcattgtcatgaagaagaattgggccctttctgttgaccaacgctggctgcaggtgttgcagttttcagtgcatctcattgatttgctgagtgtacttctcagatgtaatggtttcaccaggattcagaaagctgtagtgggccaggtgtggtggctcacgcctgtaatcccagcactttgggaggccgaggtgggtggatcacctgaggtcaggagttcgagaccagcctggccaacattgcgaaaccctgtctctactaaaaatacaaaattggccaggcatggtggtgtgcacctgtagttccagctacttgagaggctgaggcaggagaattgcttgaacctcggaggcagaggttgcagtgagttgagattgtaccactgcattccagcctgggtgacagagtgagactccgtctcaaaaaaaagaaaaaaaaaaggaagaaagctgtagtggatcagagcggcagcaggccaccaaacagtgactatgacctttttttggtgcaagtttggttttgggaagtgctttggagcttctgggtccagccactgagctggtcgttgccagttgtcgtataaaatccactttttgtcacacgtcacaatccgattgagaaatggttcattattgttgtgtagtataagatggcacttcaaaatgacaattttaaaaaattttccttcaggtcctgaggcacccatttattgagctttttcaactttccaatttgcttcaaatgccaaacgaccgtagaatggtcaatgttgagttctttggcagcttctcacttagctgtaagacgatcaacttcaatgattgctctcaattggtcatttgtcaacttctgatggcaggccaatgatgttcctcatttttgagtctcctttgcaaaacttcttgaaccaccactgtattgtggtgtagtttttggtagtatttgttagtagttcctaggccaaatgcgttgttggtgttgtgagttgtctctgctgctttatgaaccattttgaccccgaataagaaaatcgctggaatttgctatttgtctaacatcatttccatagtctaaaataaatataaaataaacagcaaataataaatcattaagaaaaaaaacaaagtgagaaatgtccattaaaatgatatatagcataaccacatttattttaagaatgtattccaatatcaaacggcaaattccaacaatacaaaacctgcaatgaacgtttgcaccaacccaatatttcagttgtttaacatttatttagaatatttttctttttcagtatgaaataaagaactactgtactatctataactatttactctgtgacaaaacatttttctaaattgatctttcacagtaatattttaaattattattttcctatggagatgttaaaataaatttagggcattcattatcttagaagttatagaagtcagaatgagtttttggtgtaatttcttttttgtattgaagttttatttttaaatgccctaagtgctgtctgtatttatgtatgtaataagttcataacatgttaaaaaatggatgctgttgtaagctgagattgcgccactgcactccagcctgggtgacagagtgagagcctgtctcaaaaaaaaaaaaaaaaaaagttgctgttgtttttatatgcagcccctatttccttccttaatctacagcttttgtgtcataccttcattcctgccttccaggtaggaataatccagtggtaaaactatgtgtgatttagatatttttatggaaacactctttgaaaatgtaaagtctgattcttgtctctgttgacagaccaaatttctgacctgtatgatagttaaccttaagaggttaatcttagcctagtgtgaaaattaatactatagttaatatattataaaattatttataatataacattaacattatgaacaataagtaatattgtttttgacagagctgttgtttactaaaagatattcaaacactgttatctttaacagttaaactttataaatttatactaaggagaaataaaaaaaatcctttttatttgggaatgcaacctcctttaaaccatcaggcccagaaaggaatttaaaatgtaacagcagtcacatctcattccccctagagctaaataatgacctcttcaagctgcttgctattggggctccagactaactgacgccaagtacccataaaatgccatataccctgtagttcaacaacgtatatccaatcaccaagcaatgttatttttgtaaaccaatgagaatttctgatgaacagcttttgtaattgccgcctctcctgattcgtcctttttttctttaaaaacttgagactctcttttgttttctggagcactcagctaggcaacttggaagtgtgtccctggctgcagtcctcaacctttgtgcttgaataaactctaaactacaatctcacccttttgattgttttaggttcacgctaaatatgtacttaaaattcctaggaaaaaattgattcctgaatatggttactagcattattcttgttatctgcagtatgaaataaatggatttgaaatgtgtttttctctgtgtacatgcagtgaatagttgggctcttatttgcctagtgatatgataaagaatcttaggttaggttatcttttgtagtaaaatggaaaaaaagagttacatgttcttcaataaaagccttattttctagtctttgctggtataatgggtaaaatggtagctcaaattttaatttgcatttttttaattactagtgagtgagagtgagattctcttcatttactcgtatggatttcacttacagttccaaatttagcaaataaaaatacagataccttgttaaggttgagtttcaggtaagcaacaaataaatttttagtgtaagtatgggccatgcaatatgcaggacacgcttctacaaaaaacaacaattatttatctgaaattaagattcagtggggcatcctgtatattatctggcaaacttaacttcactttctgtgaattgtctgcctctgcctttttgtcagattttcagttgcactttctatcttttggttgttgtttttgcagcagttcttggcatacactggattttaatcccttgcctttttagatgttgcaaacatattcttccagtcttttgcctatcttctaattttgtctgtggtgtccaattcatcaaagttgacgccatcaaaatttttccatgtttatgcttttgagatcttgaagaaatctttcgtcatcccaaggttgcaaatatgttatttaactttttctttcattagcattatagttttagcttttatacattggtttttaatacatttggtatttattttatgggaacaatattaggagatgaggttagagaggcaatgaaggggcacattgtgtgaagacttgtcggtcattgtgaggactttggtttttatgctaagtgaaataggaagccctggagggtttggaacagagggtgccattgtctgaaccgtgcctttaaagaaactctgatgactatggagaatagattgtatgagagtgtggcaaagactgctaattctgctccaatatctaattcctcctttcttctactaccagaaccctgttggtttagccagatacatggctatgtacatagagactgtttttaaactcctcctgccaataagtatgactttgtgattagatttgggccagttagataagaacacaagtgatatgtgcaaattctgagttatctttgtaaatataaggtgcttgtcctgaacttcgtctgcccacccctctccctttccccctaactgaaagcagcagcaactggaatggcaacagttaccttgaacctaaagatccctctgcctaggttcctggatgaccttgtggaacagaaccaattactactcttcatcttctccctggccatctgcctatctctctcttgtttcaaggaagagaataaactttcttgttttagccactggtttttggcatcagtttattacagcagtttagcccatagcctgtatagtacaaaaattggcgcctgaagtggtgttccacaattaaaaagctgaaatgtatagcactggttaagtggttggtcgacagacagtagaaaacatgttataggctggaaaactggtgacccttattatgtggtggcaaaatgttcagtgagactgtcacctctaataacttggaagagagttaatttgtctacccagtttgtacctccagggaagtagttagaaagaatcagactgttaatatgagttgattcgtccttgccagtaactacaagagggcatcaaataagagaacgattagccagtttgcaattagagttgaaagggagtatagtttttagttataatatacagctaaaggaggttctctctgccaatggcctgtggtctgaattgactgagaggccagtaatatggggcattgcagtgttggaaaaaattgcttctctgtgccaaacagcaagaggtaagatagtcattctcaggaatctcctgttagattttcttggcctgacagtggcagacagtccaggcaaggttcaaattaaggatttgcttttccacctcaaccagtcatttgaactatgtaaaagcttcagttatacatacaaaatctcagttccttacaacaacaaaggtttatttcttactcatgacatgttagctgtggctgtgttccacatactttgtcacttcattatttaagccaaaggaataagcctgtttgggacattgccattcttgtgacaggcaaaagagatatggcagaaccagtgtcttggaagtggtacgtgttacttttgttcatattttattggccaaagcaagtcaaatggctaagcctgaaatcagtcaggtcagaaggattatctcaagtcacatggcctgtcctgatgtcagtgggttggagtggtataatcctcctgatgtgaatcagataatctcaaggtagctaaccttcaatcaagagagggttgaagagagggagcgatggctgcgtcacagaggccagcagataaaacaggagagttgacaagcttaatatctatgaccagattaaatccttagttgtggttactactttcttgtggaactgactgaggcaaacagaccttttgaaatttttaggagattatgttgccaaagatcccataagtttggcttgcaaaagcctctgctggtttgatattgtttgacacctaaagcaacccttggtcccaaatttgcaccagcaggaagtaggctattagatctttgctgccctattggagcatatactcttccaagtttgtttcatgtatgaccagaaaggataatggaaaagaaaaaatcttccaaaggcaaagccaagactgcctggacaagggtcttcccctcagagaacagaatctgaaatgaaccaagggacttgccttcttgctagagcagagatactttgcaattcctttctagaagtgtttcatcattgataaaaatgtgtgtttgctattcttttattttcagaatggaagacttaattgcattaatctcatttgtattccacagttgtattttgtgtgcgatggtggtggtggagagcagaggttatactcttttgttagtttgcgagccgctggactaggaaggagctacacggatgtgaatgagttgaagagggttgtatattgcccagagacctagaccttaagctaaatccagtaactggatgagacttcaagttatccctttagaaaggagatgactatttcagagtgggaagaaggatgcactcccacctttggtacgtatttagctaggcacataacccctacaaagaaattgtatttcttacgctccttgtagccagatgaagccagatttctaagttctggccagtgggatgagagtggaagtgacatatgctacttttaaaaacatatttgtattaaaaaagaggcttgttagtcatattcttttccctcccatccccgtaaatgaagcattggtgagttagcttcaatcatgcacctgagggcagtgccccaaggagtggtaagagaaaacaggaggaatcttagtctctggatgaccttatagagcaaagctacttacctttccttgaccacttgtctgcctcttgactgtaacgtgagagagaaataaattctttttttatctgagccactatattggtctcattacaggagtttagcttatatcctagttaatagagatggtaatgatataagcaggaatcaaatatagaatgttagattggaaattattcttgatttttttcagttgaagcttttcatttatgtattctttctatgaaaatttatttttcagattgtctaattgtaccaacactttagaaataaagctcttactttaacatcacccctgttataattatgctatgtttctttttattttcataagcatgtgctttacatatttatattaaaattttatatcctgatattttcatgtgatatctattttctttcttgctttagagttcttatatttgcatggttattattgtataacactcagttttactgtacttaaaattttattattattggtcactgtggactagttatgtccccccaaaattcatatgttgaggccctaaccttccacatgacagtattggagatgtggcctttaaggaggtgattaaggttaagtaaggtcataagaatggacccctgatcagatagaactggtgcccctataaggagaggaagagataccagagctctcttttcacctgtgtgaagacacagtaagagtacagccatctgctagcaaggaagagggtcctcatcagaacttgacaatgccagcgccatgatcttagactgcagcctccagaactgtgaggaagtcccagtcatggtatgtcattattgcagctgaagttgatagtatattggcatttagattgctttcaagttttccttctataaataatgctgttttttgtttttgtttttgagacagagtctcactctgccacccaggctggagtgcagtggcatgatctcagctcactgcaacctcagcctcccaggttcaagcaattctcctgtctcagcctcctgagtagctgggattgcaggcatacaccactacgtccggctaatttttgtatttttagtagagacggggtttcaccgtgttggccaggctggtcttgaactcctgacctcaggtgatctgcttgcctctgcctcccaaagtgctgggatgacaggtgtgagccaccacgtccggccataatgctgtattcttgtaaaaattatttatttgttgaattatcttacgtaggactcgatctagaataattttattttatcactggtaataatgacagaaacaatattgataataatagtaataacaatggcaatcagcaatgatgattataataaagacagctatgataatgacaagatcaataacagtaacagactgggtatggtagctcacgcctgtaatctcagcactttcggaagccgacgtgctttcggaggatcgcttgaagccaggtgttcaagactaatctgggtaacatagcaagaccttgtatctacaaaaaaagttttcttttaattaactgggcatggtggcatatgcctgtagtctctgctactcaggaggctgaagtggggggatgacttcagctcaggagttggagttatgatcacaccactgtactctagcttgggttacagagtgagactctgtctctaaataaatatatatatatatatatacacacacacacacacatacacacacatttatatataattataacagtaagaatgacatatttattgcatgtttactgtatgcaggcactgttttaagcgtttatcttatttgatccttacaacagatttatgtggtaagtactgttgctcatgttttgtagataaggcaagtgaggcactgggaggttgggtaccttcaccgtcatcacgcagctgattaatggtaaagtgtagattctcgctaggctttacttgccacagagcatgctatggactgaattggatccccaccaaactcatgtggaagccctaatcctccatgtttatagtaattagagatggggcctttgatagataattaggtttagatgagggcctgaaggtggggccctcatgatgtgaatagtgcgcttataagaagagacaccagagagcttactcttgctcttccgctgccatatgaggacacagtggtaaggtggctgtctgcaagcccagaagtggcccttatcagaaagcgaccatgctggcaccctgatcttggacttctcagcctacagagctgtgagagaataaatttctgttgtttaagccacccagttaaatttctgttgttgtggtagctcagacaaagacaaagcctatgctcctaactgtgacatgacatgattagaggttttttgttttttttcagatcacacagtcagtatagcaaattggactgcaaagaagggaccaaaaaagtggaaaggacaccaagaaagaataatgttactgaagccaagagacaagcattttaagatcaaggatatcattattaaattgataacactttgagggaattttcatttaagaagtcatctgtgctttgggaagagcagttttgtgtttgcagtccagattgcagagggttaagtaggaaatgatgtggggtaggggagacagtaaaaacagttttaactctttttcggacttggatgtgaaggaaaagaggcaaataggaagtggcaagagagacataaagtctggggatgtatattagtttggttcatttttttaaatgaatcaaatgatgggagaaatgtaagcatttatgtgcagcggggtaaaagaagagaaggagagatagaaaatgtggagggggaagtggataaatgatggcatcagatccataaggaggtggataccttaagttgcagattagctttgagcgggaagtttctttcctgcatcttcctggcaccttcctccacagtgccaggaaggagggaagaatgtgcgtgtgtttgttggtcagtgagggtggaggaaactgagggagtctgacctaataacccctcttttgtttctgtggaggtgatgtcattttctgagtgaagggggtgtagggagcttgaaagtggtggacgtttggaattgaatctgtgggacatcagagagcctgagagaggattgatggcagcagtgagaagggtctgctgaggtgggaggccatgtatttgtggaattcccagcttgtgcagttggggattttttttttttgagacggagtctcgctctgtcgcccaggctggagtgcagtggcgggatctcggctcactgcaagctccgcctcccgggttcacgccattctcctgcctcagcctcccgagtagctgggactacaggcgcccgccaccgcgcgcggctaattttttgtatttttagtagacacggggtttcgccgttttagccgggatggtctcgatctcctgacctcgtgatccgcccgcctcggcctcccaaagtgctgggattacaggcgtgagccaccgcgcccggcccagttggggatttttataacagtgatctctagtctgggtatgggactaaagaagtagactcttacattggtttagggagtgtatgtggaaggacaagccagtaagacagttgagaatttaggccagggagtgagaggttattaggtcagattccctcagtttacttcaccctcactggccaataaccacacacacattcttacctcctttctggcattgttggggaagagggtccctctttctgggagatcagattctgggttacaatggataagaagtgaagcttggaggatggttaatggattaggaaagatagagagtgaagtgggaaagagagagtcaggtggagaaagaccagagcttaacagatttaagaacagagttggtgtatgcagtcattccttcaataaatgtgtgttgagcatttatcttctagacactgttctaggtgctatggccccctagatcaaaacagtgatcaaaacaaaatctgcccttgtagagcttaattccaatggggaggtagacgattaacatatattatgtgtataaacatatacatacttgtatgtataatttcagatggtaagaaaatgtcaaaaagaaaatgagattggccaggcactgtggctcatgcctgtaatcccagcactttgggaggccgaggtgggcggatcacaaggtcaggagatcgagaccatcctggctaacactgtgaaaccccatctctactaaaaatacaaaaaattagccgggcgtggtggcgggtgcctgtagtcccagctacttgggaggctgaggcaggagaatggcgtgaacccaggaggtggagcttgcagtggagccaagatcatgccactgcactccagcctgggcgacagagcgagactccatctcaaaaaaaaaaagaaaaaaaaaaaagaaaatgagatcagggaagagactctgagaagtgacctctgagcagagacatgagtgttatcaggggcacagcaatgcagatgtctgagagcattccagggcaaggaaacagcacatgtttgtgcaaagccctggcaggggcttgtataaggaacagccatggcactggggagcgtgagtgaggaggaggacagtggtaataaattagggccatgatacattagggccactataaggacctaggattctattcaagggtcgtgaaaagccgttgaaagtgtgagtcagagacataacatctgttttacttttctgaaggctcatactggctgctttttggagagttgattggccatgggcaattaagtaatccagagaggtagaaggacaagagatggtggttcacaaataacatatgggaatttgagatttcagcagttgagtgcttctgagtgagaatctcgttgctattcctttaagcagacacacccactccacaatagacgttcttttctgtggatgaaggcctgaccctgacccttggcttataccgcaccctttcctgtttttgactctcttcctcaccagctccattattcattctcccattttgtcctcaccttgtctttcatatctgatgcacattgttgtcttcctggccaagacttcctctagatctaggttttcagaccttttattcagtctgacttcagacttcagtctgcagaaaactttgatggaagcccagtgtgtcagccaggggaaaccgagggaaatgggggtcaggagtgcagtgctctgcccacttgcagttgtactctgacctccaaaacaactttgagacaccttctgagaaccgttagcctgccagctcacagtgtggaaaagccccacgttgaactgttgctcttttgcagcagctcatccctgggatcaccccaggccatgctctctctgctcagcctgtgccttcttaatcctcaggcacctgttttgcctgacagtggtacgtgcaccctcccgttacaaagtggtgtgctgagggcactcagaaccatgaagcatgcatggtgcatcttcctgagtgttaattttcctcactggctattatttaatccactacatttttatagtaaaagttaacatagttctaattatacaccataggttctgtctgtccttctcaacaaaatctttttttttttttttttttcaaacagggtctcacttcgttatccaggctggagtgcagtggtgtaataatagctcactgcagccttgaactcctgggcacaagtgatcctcctgcctcagtcatgcaagaaagtacctagaactacagatgtgtgctaccgtgcccagctaatttttaattttttttttctggagcagggtcttgctttgttgcccaggctgatctaaaactcctggcctcaagctgtcctcccttctcagtctcccaaagtgttagaaacacaggcatgagccattgtgtctagccaacaaatttttttaatgaccctaattaaacatgttcaattttttatgccaaaagaaaatagatgtactatagtttagaatgtaacatttgtgtacaatttttaaggaaaaaaataagatcaagaaatttaaagtttccatgggccacttagggttatgtctttagtcttcccaggattatttggtccctcagctctgaattaggactactttgatggaaaaggttagaactacctatttaagttgtcagatttgtaattctgtattttggttttgttcagtggagctattataacatttttattcagcatggaataggaactggccatgggttggtctctgaatcatcaggcttttctggttaaaggtaaacatataagtattttttcttttagccatgtttaattttgaaaaatgtcattaaagtaagcattgctgcattataaaaatgattgacaagtccgggcactgtggctcatttctgtaataccagcactttgggaggccaaggcaggtggatcacgaggtcaggagttcaagaccagcctggccgatatggtgaaaccccatctctactaaaaatacaaaaattagccggttgtcatggcaggcacctgtaatcccagctactcaggaggctgaggcaggagaatcgcttgaacttgggaggtggaggttgcagtgagccgagattgagccactgcactccagcctgctgggtgacagagtgagactccatctcaaaaaaaaaaaaaaaaaaaaagaattgataagaaccaggtgatggcctagctgttggagcagtactcaaaaacaaggttgtcctaggccacaaagtaagtttgatgctttgcatttaaaaaaaatagggtatcttgtgttaagctttgtaatgcttcctctgagttgagagtgaatctttaagataaaacatttctttgtcaggactgtttgcaactaaggaatttaaggttgagggttttgcaggatactgccaaattataagactaatgagggcaaggattggatcatgttcatggatgcacgtgagctaggagtagtgcagcacctcacatataatacttagtattttttgagtgaaggaatgaactatccttggtataactgtggaaaatattgttaggttgtataatagatagaggatagcttccctgtatctattgagttgaacaaggcagccttcctggacgtgttgtcacaatattgctatcagtatatggctcttttaaattaatggaagcagaggcacagctgtacgttttctttaaaagagtgccagttatcaggtctgtttaatcacatgccaattctgtctgcaaaatggggatagcaacacacaatctatctagtgcaagtagctgcactaaggttagatgaggtatacagggtaagagaaaatacttgcaaattatatatctgataacggacttatatccacatttataaagaactcttgcagctcaatattaaaaagacaaaaataccccattaaaatgggcaacggatctaaatagacatttctctaaggaagatttatgaatggctgataagcacacgaaaagatgctcaacgttgtcactcatagagagaagcaaatcaaaaccacataagatactacttcatgcccactagttagctgtaatcaaaagcagataacaagtgttagtgaggatgtggagtaattggacgctccatacattgctggtaggaatttaaaatgggcagccactttagaaatagcttggcagttcttcaaaaggtgttaccctatgttacctagcagtttcactcctaggtatctgtgcaagagaaatgaaaacatacctacatacaaaaacttatacataaatgctagtaacattattcctaatagctaaacagcggaaacaacctagatatctatcagctgatgaatatataaacaaaatgtggtacatccatacaatggaatattattcagcattaaaagcataaaggaataaagtactgacacatgctataacataacaaaacatgctaagtgaaaggatcagacataaaaggctatatgttgtatgattccatttatgtgaaatgtgcaaggtaggccaatccatagggacagaaagtagatttgtgagctgagagggttagaggagggagatggggaatgactactaatggatagggagtttcattttgggatgataaaaatgttctaaagttgcggtgattgtggcacaactctgaatatactaaaaccatggaattgtatatttcaaaagggtaaattgcatggtatgtgaattatacctcaatgaagctgttaaaaaagaagaagtgaggtaatatgtgggaatatactttgagctgtttgaaaagatattattattattatttcaatttgactgtaaggccattaaataaaagcaggatgacttagatatttttccttgcttgcaggcttgtgatttttatgccatgactcaactttataaggctgtaactcagcaatataaaatattgaaaatgttgaaacataaaatgaaaactgctttgtctactgtttatatttaataggattttctgaatcagttaattagcaataagtgaatgtgtcattaagaaattagattttagaatcgtaaagttttagagctggcagaaacttcagaagtcatctagtcccccctcattttgctttatgagagagctgagtcctacagagacaaagtaagatgtcttatgtcatggcattgagtaaattctagaactgagtcagtgttctttctgctgactatttggtttcagtgctattaagtgtgttctactattaatagaactaacactcttaatagctatttaaatgcttcctatatactaggcactctctgttaggtactttatatatgttatcttggttaatctacacaaagcttatgaagacagttcattttacctgtgtattagttttgtattgctgctgtaaaataaaatgaaacaaacaaacaaaaaacaaaagatctggccgggcgcggtggctaacgcctgtaatcccagcactttgggaggccaaggcgggcagatcacgaggtcaggagatggagaccagcctgaccaacatgatgaaaccctgtctcaactaaaaatacaaaaattagcagggcatggtggcgtgcacctgtaatcccagctactcaggaggctgagacaggagaatcgcttgaacctggaaggtggaggttgcagtgagctgagatcacgccactgcacttcagccagggcaacagtgtgagactctgtctccaaaaaaaaaaaaaaaaaaaaaacaccaaaaaaacctttgtgacttaaaacaacacaaatttcttatcttacattctggaagtcaggagcccaaaatggacctgacatcctgttagcagggcttcccttctccctgaaggcttaggggaggtcaattttcttgtcttttccagcttctggaggctgcctgcattccttcacttttagtctctttgcatcttcagagacagcagtggctgggcaaatctttctcacagtgccatttttctggttttaattcttttgtccctgctttcccctttaagaacccttgtgattactttgggcccatctggataatgcagatactctccttattttaaggcccactgattaccagccttaattctgtgtgcaaccttcattccgccttaccaaatgagtggaaaaaacacactcaaaatggtttttttttttctattagccaacagcaatcaacacagaagacttttgtaatcacacgtgtgggagttcccccccccgccccccgccaaccacaccaagacattttgcagcagacaccactcgggttgccttcaattcaatgctgacaccacctggagagagtgtcagatcccatatcttcaggcctcagtctcacagcaagtctcaggaggctctacctgtgcttctgaccaacctgctataaattggggttcccacaaccacctctttgggttcatttaatttactagagggctcacagaacttaggaaaacacatctactggtttattataaagggtattacaaaggatgcagatagagaggtgcacagggccaggcatgtggaaggggcaaggaactcccttgccctccctgggtgtaccaccatttgcgaacctccatgtgttcagctatttgaaagctctccaaaccctgcccttttgggtttctatttaagcttcattgggtaggcatgattgattgaatcattggctgttggtgatcaacttaactttcagaccctttccccttcctagagcttggagggtgtcactgaacgtcccaaccctctaatcaagctttggtctttctagtgtccagcctccatcctgaagctacccagggactgccagccatcagtcactcattagcatacaaaagacatcactttggagattctaaggattttagcagttgtgtgccaggaaatgaggatgtagaccagatatatatttcacaatatcataccatgtaatatagggtagacagagattccagggaataagggatggacatcctttgagggaggcaatattctgtgtaccacaatctgttaataagctgaagagatttaggctcagagagattaagtaagttgtccaaggtcacaacataataaatgaaagagctgatattttaacccagatctgttatttatcatatatgcatatctttcacaataacatgatctttcccacaaataccatttgatcctacttaggaaaagtaaataggatgatgagcattgttcaaatagtaaatacctatttttttattgtatatatttaacgtatatgatgttttgatgtatacacacagtgaagtggatactacagtcaagcaaattaacatcagtcatctcacatagttactctttttagtggcaggaaaatctcttttagcaaaaatctcaaatacagtacagtattaaccatagtcctcatgtcatacattagacatcgagacccctttatcctgcgtatctgcagctttgtatcctttgacctacatcttcacattttctcccccgtccacccctgtttaccatcattttgttctctaagtattcaactttctttttcttttctttttttaagattccacatataagtgaaatcatgcattttctgtgtcttgcctatttcactctgcataatgtcttccacattcatccatgtggtagcaaatggcaggatctcctttttaaagctgaataatattccatttacgtacgtgcatgtacatatatatatacacacacacatatgtacacacacataactcacagttcattcatctgttgacagacactttggttgtttcaatatcttggctattattgtttctaaatcttggctcatgctacagtgaacatgggagtgcaagtatctttatgagatggtgatttcatttcctttggatatctacccactggaggaattgctgagtcatatggtagttgtatttttaatttccttaggaacctctgtatggtttttcacagtggccgcactgatctgcattcccaccaacagtgtatgaggtttctctttttcacaccatcaccaacacttgttatctctggtaacttattaaagtaataatcacatttgcttaataatatcaagaaataggctatgttattatgaaacagttaaaagcatataggaagtttatttattgatgtgggaaaagtatttatgactcatcatgacttccagccccctcccccacatttctacttatcacttcctttctgttaccagttccttccttatccagcctagatgctttgattcaaattattttccggcaaattctttcaattcctttgtacctctttggtctctccaatctcagaactggatgagctcaactacctgccagttttttcactttaatgatacgctcagcagccttaaaattgtccagcagtcttccgacgtgtctattatctcactccctcactcctcacagcatactgccttcattcttctcaaaccttttaaccccctatcagtgttatttgatgtcttagcagttttccatgcagttgaccacaattgaccattgcttccttttggaaacacttgtctcttggcctttgagacaaacccttccctggttttccttctcccattctagttgaccattttctgtcttctgtgttacctgacatctaaaagaggaaaggtttagttctcttgtttttcatcttgtacttttggttaaatataatctttttgtgtaagtcttattatctctagcccagagtttgtcatcttcagcactattgacattttgggctggaaaattttttcagtgtcaggggatgtcttgtggattgtaggatgcttagcagcatctctggcctctatgctctaactgccaatagagttccctctacccttattgtgacaatcaaaatgtctccagatattgccagatgtctcctgggtgcataaaatcaccccccattgagaagtacttatgtagcctgaagttctcttctgaggatctggggataacacctttctgacatctccacttgaatgtctcctaggcattgcaaatttaatgtgaccaaaatggactcttgttttttcttccatatatgctctccccccagattttcagattttagattatttatgatcttgcattggaggtaccaataaaagccattggaggcttttatttggagtaaactagggagccaccagagagttttgggccaagaaatgacatgatctcacgtagatcagctctttcttgagcatagactatgacttggaagactgaaagcaggaagaccagttaagaggctactgtggtaatcacagtgaaaaatggtagtagcttgtataaggatggtagtagggcatatgataaggagtggcatctttagtttagtgcttaaacacaaatagccctgagaagaatgcacttgtaccttcatgaggttagtatcagagtatgctttgtttttcagatgttttctaagaacttgcagggaacaggttttggtgggtcagaatgagaagacagtagccaagttcctgggttcctccaagccagaacttcctgggatgttacttgaagggattcaggccagaacagggttttaaaacaagggacccaacgggaagagtaagcaagacatccaatactacctgttctacctcacaatcttacttagggctggtcctcccacggtaaaacatgtactgggtggcagggtagatagaacaattggaagtcaggagtgtttccttcattaaatataggaagcacatcatcttgggctggaaggcccttagctgaagtgaggtggctatcggcatttgggatgggacaggtttttgttgtacaagattgccctacacatctcaagacttgcaatagtgtgctctctcattgtgacatctaaaaaatgcctccccacatttccagactccccatgggagtcagacgtgttcacctgtataccactggactgagccccctttgctaatttgaaaactgccttctgtaataggaagttagtcaaaaggctatacattccaggcccttaaagaaaacctgcattacttgtttggggacttagaaggtatctactagtactttaaattagcatctatgtttattgctgatacatcccataaatgttttctgtccatgttatgtaccttaatatactactttgtaattcttttgtaggggtcatagccatttcagggccatctctaaagacactgcaaaggacacatgctctagctgctctcttctccgtattgttatataagggaacctgaattaaaatgaattaagagtttggatgaaagggcattccctagccatcttagcaaagggagtgggagtaggattggaagagggaggataatggcctgtatgtgaatgtttatgcacatcatgttttttaaatcaggtctagctagtatcaagagctaaatattttttaatcgtatttttgaaaagtagtagaaaatagaacaatattcagatttgtgaaggattgatgactcagtattagagggaaaactcaccaaggaaaagatctaatagttttgaacatataaaatgtaaggtttatttacaatgaaaaaaatcacacaacacactggaggaaatgcttgtatcaaatgtgactaagggtgaatatctataatatctgaagaggaagttctctcgaacttaatgaagaagttttaatacataagtaaacaaagtattttagcagttaatgattaataaaaaggtgggattatgtttaccgtcactggtaatcaaagaaatgccttttaagttaaccttgagttatctcttctattctttcgaaaatactgaaaattaaaataactgacaattctggagaggctttaaggaaatggacccattcagtcttatgtgtttcttgtgctactcccagccactgcctttccctgaacatgctgtgccattttaaattcttacgtctcatctttatgagtccttcccctcttctttctgttgactttccatctcttgagagcagcattcagatcctgggggcatcccttcttactcagccctgccaatgagcactctgatttgcattcggcactgtattgcagccatgggtgtatgaatcagtccctaccacttggctggggagttcttgaggttgggactggtcaggccctgcatcagggtctggtatacaagtaattattcaataactattgaactaaattattggattttggtgaatgttttaatgaactacaatatgttagggtgatggaataacatgatcactaaagtgcaattataagtgtaacttatggcaaaattttgtaaccaaatacagaatgatatgtttagtgtaatttcaactgcattagaaaggtaatatgcagaaaatgaatttttaaatattttaaagttataggtaacaaacttttatttctttattacaatctttatgatacaatatataatttttaaaatcagttggcacacttgacctccctctcttctcatcagaattaacctctctgtgtcctgtccaattatctgattgaactctcaggaaatagggtgggcctccccagaatgtgggcttttaaggatagctgcatttatgtgactgaattaggtccccaagcattttttgagcttttactgtgcctgggtgcatataacttgaaagatatggtacttagtattttatagtttgtaaatacattcacattatcagcgatgagttctacagcttttaataatgtcaaatataaatggtagttgtttttttaaaacattttttgagtatctaccatctgccaatgactgaaatacagaattcctttaaggaagtccttgtctgacaggaaagacagacatccatgggcctttcatacagcaagatgagtgttgtaatcgtgttgtaatgagtgcaatgggttgtagagtgaatggagaagcagttatttcttaagagggctggtgagatgagatgactgttctctggtaagataactctcgaacaggactttagaagatgggcaagatttttgcaagatggataggagaaaaggggaaaagcatgaacagaaaggtagaagtgtagaaatacatgatgtcttcagaagccactaaaagattttggagagggatatgacatgattaggtttgtatttggaaagaaaattgagatcagtgattataacaaggaaacacaagaaaagttttttttttttttgcatgcttttctatgtgacaattttgtgagcatccccagattttaaattgtaacatagataggacaggctttacattatgcacagttctggccagccaaccatatgccctctcatagctgtacatcagagtgtcccttctaaaagtctgggtgaacagtgggctacaggaatgaggtcagctaagaagccattgcagtgttccacatcaccacaggaagtgatggcttaatcagggccatgataacagaaatggatgggagggaatatatttgcctatgtagacttggtatcagagttttgtgggggtagagagaaaaaggaattatacatcagtgtttctcagattttaatgtgcatgtgaattgtctagggattttgttaaaaggtagattttgattcaataggtctggcagtggggcctcagattctgctcccaagtgatgccaacactgttaggccatggtccagtgaataattaacaaggacgagataacgtgggtgtgagactccgctggctagatggtgatgtcattatctgaaatacctgaaatggggaataccagagaaaagaaagcttgggcagggggatggggtgaagtttttgtgggacattcaggtataaaaattgtagacagctgaaagtttggattctaagcttgagagaaaaatcaagcatagagacacaaatttgggaataagcatttcgttgccgacataaaagtcatgagaatgagtgacattacctacaaaaaagagataaagttaatattagaaaatatacctattccttcatcattcaaaggcctcatcttctaaaaagacaaataaagaaaatatacctatttgctaaaattttaatgtccatttaagtgactataaaccagcaatgggaaagaaattggataggtagcttcctccctatgaacaatctctaggtgtaaattgaggggaggagaagtcttctttggaaacccccccttttccttggtaatgaccatagatcaagttaaaaacgattaaagtatcttatgagaaatcattcatataaataaatatgtgtaaagaatcgtcaaaatgccaggcagtcttctgaccttaacattaatagcaaatgaaatgaatccctgaaacagtggagcttatgggggagattgacaaatgctgtgttaggaaagtatagtgtcatgtgagagcacacacatcaggaacacatgactcagtgtggagacaagggatggccttcctgaggaagtagcattaagctgagaccagaaggctgagtggtggtgacctacaagaagaagaagggaaggtcataacagtaatgacttggagtggagaggccctgcaggttggagaagttcagtgtggctcaccatggagtgtcagagtgagggagatgactgctgagctccgagaggtgaacagagcccctggtgaggcccactcctctgggacttagtagagagaagagggagaaaatgatgtattttcccaaggaaaaactgttattctactttggtatagttcaaacaacagtcttatgcatatggttttacaaggcttttatggactggcctagtaatgacatgactcatagtaatgttgtttctataggaaaaatgttttgggcttcaaaagctgtcttacaatttaactttcagatttttttttttccatttgggaaccgcttggataagagcacaattctagtgttttttgttatttctgttaaaagtgtgctttctctggtatgtatctatgtggctacagtgttgattttccgtcttctgatatgaatcaaagctatcattgcacagatgcagttgaaatgttgttttattttcttgaccagattcagaaagtgtatggaaatagagaaatctttttataaattgtttagttttcaaagtgtttgttcttcaaagttaaggattccctctgtaaactatatcatggtatactgtgttatataccatgaaagtatgaaaaatgaaactgccatgaaaattgttataaacagaaagtaaaagagatcggtgtgttttcactattgaagtcaaatagaatgcagaaggtaaacaataaaggataaaatacctagctttaaaaatactttaataaccatgagcttatgatcataatcgtcttcattactagctattgttatcattagtaatacttgatttttttttttttttttttttttttttttttttttttttttttttttgagacagtctctctctgtcacccaggctggagtgcaggggcgtgatctcggctcactgcaagctccgcctctcgggttcacgccattctcctgcctcagcctcctgagtagctgggactacaggggcccgccaccatgcccggctaattttttgtatttttcttagtagagacggggtttcactgtgttagccaggatggtctcaaactcctgacctcatgatccacccgcctcggcctcccaaagtgctaggattacaggcatgagccactgcgcccagccaatacttgatattttaaagcaagaaacagcagctgttaaggtcactccctttgtaaaatggatctatatgagtttcattttctttaataaatgaaactttaggctgaaactctcaaattcccttatctccaacatgcaaagttaatttcatccacatctgtcttgtgaaagtatctttctttctatatcagttagaatgctttcagctggtaagtgacagagacccaactgaaagtatcgtatgtaataactgcattttattgtctcatataactagaaatctggaagaaagatagtttttttgttggcttatatagcagctaactcttatcatcagactctctggctctgtcttttcattctaccatcctgataagttggcttttgtcttcagacttttcccctcctcatctcaagatggcagctttaactccaagaatgacatactcatatcaaagcacccatgactgtaagaaaagaaggtgtctctcttatgtctttttttaaaatgaagaaaactttcttagaagcctcctagaaaacatgacctcattagctaaaattgcatcctatacccgtttctaagccagtcagtggtgaggggtacggaagtcctgtgtttggcttagactagtcaagattcatggcccttcactcctcccaaggtaaaaaaaaaaaaaaaataggattttgttattcagaaagaagggaagactaggtaggcaaccactagtgtctgccgtatcttccaaggccaatttatttgcctagagctttaattcctttctgcctcttagaagactttgttaataatttctttttgcgttcattttcagtcttctcattctttttcttcaggcttattgaaagaagagtctgcatatgctgccttcatttttttcccctcccatttattccttaaattccttgcaatctggattttgttcctcctaataagaaccttcctttctatcaacagcaataaccacctgattcccaaatcctttgccagtgtctttgttttctggattttccattctctgtttcatttgtttgtacattattctttattatttccttccgtctgcttgcttaggtttagtttgcttttctttttgtaggttctgtcttaaggtggaagattagattatccacttgagatctttcttttttaatataggcatttatagctacaaatgtctttctgggtattattttctttagctgtatccaataaattttggtatgttgagttttagttctcactaatctcaaggtattttctaattttctctctgatttctttgacccattggttatttaggagtgtggttccctcccatctttgtgaatttcctaaaattccttctgttactgatttgtattctaattgcatgccattgtttcagagaacattctttgtgtgattaatctctttaaattattgaaggttgtttatggcctagcatgtggtctcttttggaaaatgtttcatgtgcacttaataatgcatattgccttgttgagtggagtgttatatagttgtctgtaggtctggctgtcttacagtgttgttcaaatcttctgtattcttgttgattttcttcctggtggttttatctagtattgaaagagggaagtctccaattattatttttcaattgtgtatcccttcaactgtcttttcttccttctcttgttaagtgcatatatgcttctaattgttataccttcctgatggattgacccttctgtcattatgaagtgtttctctttatttctagtattatattcttgctttaaaatgtattttgcctgattcttttatgtttactgtttgtatggtatagcttttactttcaacctatttgtatgattgaacctaaaatgtgtcttctgtagattttatatagttgggatctttgttctttttcttttataaaaatacagcctgataatctttcttttgattagattgcttcatctgttcacatttaatgtgattactgatatagttggatttttgtctgcagttacgaattttgttttctataggtctcaggtcttttttgttctttcctttcttgccttcttttgaattaagtagatatattgtagtgtgatgctttaattcctttgctacttttaaaaatatatattttgagttattttcttagtggttgctccagggtttacagtgtacatcccgatttataagaatttcacttctgatttatacttactttcagcaaaatagacttcctctgttagctccatttccttccccaactttttctgctattattgatgtacctattatgtcaaacccaacaacacactgttgtaatttttactttatgtcttttgaagaagctgagacaagggagagcaagtacgtatttatagttagttgtattgacctctctattttttattttctttacatatttctgcatatttgagttagctctggggtcattttcttactcccgaagaactttgttctcacctgcttcttttgtgctgttattgtctaaatgtatagcagtaaatgttgttagcccaataattaaattatagctacagtgttttattgaattattctttaaatcagttaagagaagaaaggggaagaaatatgcaattacagtgtcttttgcaataatgtacgtaatttcctttactggcatgctttgttttttggggcttccaattactgtttggtgttacttgcttttagcctgaagaatttcctttagtatttcttgtgaaacagatattctagcaacaaattttctgtctttatttttctggggatgccttaatttgacctttattttaaaaacacagtattgctggatattagagtcataattcacagtattttactttagtactttgaatatttaattccattgctttctggcctcccttgtttctaatgagaagtcagctgttaatcgtattgggggctgctttgtacttgtctggtcattttgctcttgctgctttcaagattttctccttgtctttggctctcaagattttgcctgtaatgtgtctggaagtatatctctttgtatttatcctatttagaatttgttgagctccttgggggatgtgtagattcatatttctttttcttttatcaaatttggaaagatttcaaccattatttatttattttttgttctttttcattcatttttttttttcctctctctgagatagggtctcactctctcacccaggctggagtatagtggcatgatctcagctcactgcaggctctacctcactgcaggcttaagcagtcctcccacctcagcctcctgagtagctggaactacaggtgtgtttcaccctgcctggttaatttttaatattttttatagagacagggtctcaccatgtttcctaggctggtatcaaattcctgggctcaagcaatcctcccacctcggcctcccaagatgctggaggtacagatgtgagccgccatgcctagcctcattatttctttaagtattatttctgcctcttttttctcctaatggcatctgttttagtccattttctgttactgtaacagaataccaaagaccaataccaataaggaaaagaaatttatttcttatggttctggaagctgagaagtccaagagcatggtgcgagcctctggtgagggccttcttgctggtgggaattctctacagagtcccaaggtggcacagagcatcacatgctgagagggcacatgagtgagaacaaaactggattttataaacagatgcactcttgtgatagctagcctacctgcgtgataacccattaatccagtaacttattaatctactaatccattcatgagagcagaaccctcatgacccagtcacctcttaaaagtactacttctcaatacttctgcattcaggaccaagtttccaatacggtgaacctttggagaacacatttaaaccatagcattccaccctgggcacccaaaatttatgtccttctggtgtttaagaatacattcattccatcccagtagctccagagtcttcattcattctatcatgcattcaaaagcccaaagttccaagtctcatgtaaatcagatttgagtgagacacatggtgttatttgccttcaggcagattcttttcagctgtgagcctgttaaatcaaataagttacctacttccaaaatatagtggtggagcaggcgtaggacagacattgccattccaaaagggaggaacaggaaaaaattaaggagtaacagatcccatgtaaaacgaaaacccaacaaggaaaacagcattacatcttacagctggagaataatctcctttgactccatgtcctgcatcatgggcacacgggtgcagggttgggcctccaaggcctcaagtggttccaccccgtggctttactatgctcagtccatatgtcagcccttgtaggttacagttgggtgcctgtggctttcgcaggttggacctgcatgctggtggtatagttctgggatctcagcagcattcctgctcccacagctccattaggcattactttagtggggactctgctgcggccttgcttctggctgcactaggcattgccctacgaggggctctcagcaatgagtctacccttgttgacaagtctctgccagggcaccagtctttttggtatatcctttgaaatctaggtgaaactaccatagccccacttctgttacattctgtacagctgcagaattagcaccttgtggatgccaccaaaatttatagcttgtgccttccagagtggtgagttgagccacacttgctgctacttgggtcatgactggggcagccacagagcattgctgtggggtgcagggagcagagtcctgaggcagtcctggacagcgggctgtgcagaatgccatggatgccatgggctcccacaaaaccattctgcactcctaggcctctgggcctctgatgggaggagcagctttgaagatgtgtgaaatgccttttggagtctttctctaattgtcctgatgaatagcctctgggtcccttgtatcaatatgaatctctttagcaaatggttgctaggccacattcttggtttcctttcctaaacaagctttttaaattctacatagccagcctgaggagagttttccaaatctttccactttgcttttcatttgattataaattctgtctttgtcatccctttgctcccaaatctcactgtaagtagcaaaaagtaaccacacagtatcttgaatgttttgctgctagaaatttcttccactcgatatgctagttcatcactctcaagtccagcattccacaaacccctagggcatggacatagccttgaggcgtgtcaggctgtttgctgctttgtgacaagtgtggcctttattccaagttctagtaccttgctcctcatttccatctgaggcctcttcagaatgacctttacatatttctatcaacattctggtcatgagcacttaagtaatctctaagaagattcaggctgggcacggtggctcacgcctgtaatccctgcactgtgggaggccaaggcaggcagatcacctgaggtttggtgtttgagaccagcctggccaacatggcagaacccctcctctaataaaaatacaaaaattagtggggcttggtggcgcatgcctgtaatcccagctacttgggaggctgaggcaggagaatcacttgaacctggaaggtagaggttgcagtgagctgagattgcaccattgcactccaacttgggcgacagagcaagactgtcttaaaaaaaaaaaaaaaagaagattcagagtttctctagtcatcttcagaaccttcaccagaatcacccttaatgctccatttatggcaatgcaggtttttttctatccagctcctccacagtcttccagcttctacccgttacccagttccaaagccacttcttcattttcagatattatagcaaaaatcctacgtcttggtaccaattttatgtctcagtctgtttctgttgctataacagaataccaaaaaataaatttatttcttacagtgtataggctgggaagtccaagagtaaggtactaacatctggcaagggtcttgcagatggcaagaagtttgttttgccccatgttcagccatagattagtagcttggattattcattcccagtcactcctgagcgaagcaagccttgagcatgcccacagtctagtaaactgccagggatactttcatattaaagcctggcttcctaggagttgatcttggggcagaagagcttattgttcagccactgtttgatcagaggttatacttcagcccccgagtgacagtgaagcttccttttttaattgatctgtgtggcttgtgcccatatcaagctctgattgctcaagtggatgcagcctcccacttgggcacagccttcctgacctctgtgtttactgtgagctggctgtctctttttctagttctgttaaacttctgatagtcctaatttgttggttgctgcttgtatcctggggccatgagcaccttcttaactatgtcaattccctcagacagagcagaggaactttttgtccttaagggctgctgtctccagtctgcatctccccacaggtagaaccttgcaccactgcacagaaactgggggcaggaatagtgactcacttcttccagagtgacacccctgctataaaagggtgttgggagcatgggcattagccacttgtcttcttggcttgcccctatggatatggaacctttgccccaccagcaagttgatccaggagtgatagaagcccagtgttttcagcctgctgcacctagagtagaacttttgccccacaaatgagggctggctagagtaaggaagccctggccctctcagctgtgcctctacagaatagaaactctaccatagagggctagggaaaatgaacagtgccagtggcttgttctaccagggtgaaaatgcagccccagcttgggagctgaggggaaaaggagcccccatattcttgaccggaccttctggactagagctctcgagtaagtaaaacagactaagacataagtcagagcttggaggtgcaggggaggtaaggtgggagcaggtcatggctcaaatgccactgacaggctcttaccaagatttagaatattttcttgaatgcatgtttctccatttattatatactcttcaaacaatttccagtttaagtggttgttttaaacaattttttttccagttaaattgtttttgttggggagaaattctatggcactcttcattcctccattctggaagttgtctcttggttttgctcattaaaaaaaaaaagatatatcttcaatctctcttaatctatacaggttactttatagattcttaatctttacgttccttctccatccctttaagtttcatacagtttacctgttgaagaacctgggaggtttgatctgtagaatttcccacattctggattttaatgtgtgcgtatttgtggtgtagatccacacgtttctctgacctctataattcctataaattggcagctgtccatgaactggatcagactcagatttgattcctttggcagttctatacatagaatttaatgaagtttaggatacctctgaatcacctggtgggcttgtaataataaaatgcagattactgggtcctatgcccaaaccttctgattcaggagattggaggttggacctgagggtttgtatttctggcaagtatctgagtgaggctgaggctgctggtctggataacctactgtcaatgtttggttgcatctttttttgtgatcttagcagccatttatgcatattatttgtatctatttgttcattaaggtttgaaaaatagtaacattctaattctttttatttttttcatttattcattggaatatttttataaagagatacatgtccttatttcttattcagttacccagagttctcaaaagacaggtaacataaattcttgattttttccctttgatatatttcttaagataatgaattggttctctatcatctcttaaaggtgaccagttttttaagaatattattatgaacttttagaatttaacgtattagttaattcatttcaagtattaccatcactgaagctcaaattattccatctttggccaatggaagcctcttaaacttagctcctgagtcctagattcagctatttctcttagaagccctactgtttaaggggtgatcatgttttctctcagccctttctgtagacagagatcagaagtatgtgcacatattgaagataaaataaaaatatttcataagtttatattggtgtttccaattcaaacttgagactatggtggagatgatagtgtgtttaaatcttctttctgtatctctttcctctgttttcaaggatatgagtgcttatagaactggaaagtcctacaattatgtattttcatcctatagtgcacacacaacagtctcagaatgacaacaccacaatactactcaaaacattaaaatccatatttttgcatacattctcgcccccttaatcacatttaggactggagatgtcttctgagactttagtttattcagcaaccatttagagcatcttctctgtctcacactcactgctagaaaggggatacaaagagatgtaagatatgtccctgttctctgaaagctaagggtcagggttattgggttatgtatcattctggtataggaagatgtggccatagaatctgggattctgttcttctttaaaagaagttaatgctaatgttaattcttctttacttgcatgtttcttaaaataaaaccctttctctctactcttatcagggagcagcttccttttggtggagctccttaaatactttctaatctcccttacgtagtatattattagtcagggttctccagagaaacagagagagaacaagagaaagatatagagtttattttaaggaattggctcacaggattttgggagttggcaaatcaaacatgtagaatacagcagcaggctatatacttaagtaagagttggtaatggtcttgagtgtaaaaattgcaaaataggctagtaggctggaaactcagcatttctatgttaccatcttgatgtagacttgcctctttttcaggtaacttttatcttagctgttgaggccttcatctgattgaataaggcccaccacagtatggagtctgctttatttcaagtcaactaattataaatgttaattacatccacagagaccttcacacaacatctagattagtgttataccaaacagctggccatcataacctatccaaagtgactcataaaattaactgtcacatctaggttaactgtttattgccaaaattgatattctttctaaaaaactgtaaacttatataattttattgcttgactgacaaattggtttcatcatattggcgaacctataaaatagtcctattaagaaattattttaaaaataaagttatttctaaaacatattaacatatagctatattcattaaagcaaaactgttttaacattaaaaatagcgtaaatataattctcagtaaaagcttacattatttagtttcttagctataatttgtactaatatatttattaggtacaataattataatcttgttatctctctctttctctggagaaccctgactaataatatactacataagggagattagaaagtactaaggagctccacagaatacagctctctgtattttcctggaaaaaaaattttaaaaatacggttgtattttatctttaattgcttcataaaattgtagtctttttcaggttgcattttgtgattgctacatttgaaattattgatttttttcaagttactgttttctatataaattgtgatttttaaatttgagaatgtaatctctatgtcgataatgaggtacctggtaagttcaaagcaaattctattaaattttattttgtaatagtttaatatgtaaatattctagcacatacattttcaaagctactattaaaaaaaacagtaaactcgatttacagcacctttattcaataaaatttttatgacaaacttgtcaaataaattgtgtctattatggaaatcttttaaacatcttaaccaaatttagatgctgctaaattgtaggcattctcaagttcattttattctagtacataatataaacttatttaagtaaaaaagtaagttcgccataaaaattaaatcttgaataaaagatttctgtcttagtttgggctgctctctcaaaatatgacatactgggtggcttaaacaacaattcatttctcccggttcggaaggctggaaagtcaaagatcaaggcaccagcagatcagtttctggtgagggcctgcttcttggtttgcagacctggtttgatcttctcattatgtcctcacatggcccttcctgggtgtgtgcacttggatggggggtggtgggtggggagagagagagagatctgtttctttttataacagcattaatctcatcaggagggccccaccaacatgacctaatctaacgctaattaaaggcactacctctgaataccatcacattgggtattagggcttcagcataagaatttaaggtgacacaaacgtttagtccatagctattttcaactgactttgaatgtaatgtttgaatgaaaatcatccgttatgttgatgattttgcaaagtctaagcctcaaagaattctaagatagataacaaaaagaaaacatggactatcatgctggaattttttttttttaattcagcatcagctttgtcacaaatattttagttttttttttttttttgagacaggggtgtactctgttgcccaggctgaagtgcaatggtgtgatcacagcttacttcagccttgaccacccaagctcaagcaatcctcccatctcgtcctcccaaaatgttgggattgcaggtgtgagccaccacacccagccttagttcaatttttttaaccctgtgtgtgtgtataaacgtttgtaaattttaattggtagaatgtcacatcttttgtggattcagttgtaaaatatgtttcccccaattttgattggtaatatattgcagttttgggcacagctgtgaattatatgtgaaccacagccaagtccaagtttatttctgtttcaccattttttaaatttagtaagaacattgttctttctatgatgctgtactcaaccaaggtttgtaattgtgttatcactgtaaaaacaaatagaattgacccttattattcacagattttgttttcatgaattcgtctgcttactacagattgagcatctctgatctaaaatcagaaatgctctaaaatcctaaactttttgagtgccaacatgatgctcaacacaatcctcaagggtcatgcgcaaatgaaatactcatgggagcattttggatttcagatttttggattagggatactcaataagtatataatgcaaatgtttcaaaatttttaaaaactctgaattcaaaacacttccgaccccaaacatttcagggtaagggatactgaacctataaaatttatttgtaactgcaaaatcaatactcatgacactaggcattcaactgagtgcatgactgcaaatggtacagaatggtgaaaaatttggattgctcaacacattcctagttgacaagctgatttccttcagctctcatacggtaaacaagtctcctttttgtggtttatatagtgccatgatttttgcttttttaggcttatgatttctgtgtttaaaatgactacccagtgtggaactgaagtgctgtatattgcgcctaagtgcaagaaggctgtgatgtgccttaaggagaaaatgcatgtgatagataaacttatagtgctgttggctatgagttcagtgttagtgactcaacagtgaacagccatacattgcttaacaacagggttaaattctgagaaatgtatcattaggtgattttgtcattgtgaaagtatcatagagtgtactgatatgaatctatagcttactatacacgtaggctatttggtatagcctcttgttcctgggctacaaacctgtacagtgtgttactatactgaattcgtaggcaattgtaacacaatagtaaatatttatttatctaaacatagaaaatgtacagtgaaaatatagcttgataatcttatgggaccacctccatcatatatgcagtctgttgttgactgacacatcatgcagtggatgactatatattaataaggtatcttgaaacagaaatatacataaaatgaggttatgtttgatcagctaattaaaatgtaatcagaggctctcaggagctctcaggaacccaaccctgaatttcccttatgagtaaacagtttggtattccctaattcagtgttcatggtgacttcatagaacttaactactgtgaataaggagaaccaacggtaattttgtctttgttgttgaacttctaaactgatttttaagtagcaattaaagcaatgtcaagtgtttcatattctacagaatgaacttccaaaagctttactttggtttcatgaattagatgaaatcatcaaaccattattggaattaactgatttttctggttggtacatctcctgatgctgacagaaagctggcaacatttaactgtgagtttttctgttaatggagccaaccagttttcactttactttgatgatgtaaaagagacgctttagaatcagaactaagtgcatttttttaaaaagtcattggatctagatgaaaagtcatgctttagagaataatacgtaaaacactttctctgtcctgtctgctttcattaaatccgtgtctttaagctagccatgagcagggagcagtattcagtatttcttctaccttcattcaagactggaggagttagctgtccctacctgctcctgcctaggtatactttttctgcatggtgcctgggtgctgtctttaagaatgaagtatcagttacagtacatttagtacatttagaaatgggttactgctaggtgtcttaaagatttaagcaagttgcgaaattgacaactggcttcattgcacatgcatctcacacatggctcaatgagattatggcagagcctaaaagtacaagtaagtcttagcatattttaatgctatcattaaaaaaaatcattagaaaatgaaaaatccaggacaaatggtaaatttgtgggacactgggacaatggccgtaaattgggactgtctcaggcaaactgacacactttactagacatgtgtccttttaaaaatcttcaaatcccaaactcttgattactgttttcctgtcaaaaaggctgcgccctgaatatgaatcacttgtttgtgactgtttactaatttccacagtattatgcacatggaaaagaatgtgaagcattcttcttagccagttttattcattgtggcatttctttttttctggaacattttctatttatcttaaaacttttattaaattttgcatgctttcatttttaaactaaagacatgtaatcaactatggaattattttcttctacattagttcttttattatcttaataaaaatatacagtaattaaaaatgaaacttgaaaagaaggcaccttttacatatatttgatgaaaatggattatctgaatatgattataataatactttgtattgttacagaattaattaaaaggatttacggtatatcttatgactctacaggagccttgggatataggtaagtgacaagcattttttgaagagagatttctgaaacattaagtaatttgatctcataggttcctggcaaagtagacagtggggcatatcttacttcagcaattaactcttttctcttcagtataacatttgtagaaatatcacatttacatgaatcttcatgtaacatttccctaatagctaacaaatcatatttcccagggaattttaggcttatttgtataataattacaatgaagatattgtttataagacatagaagtatggcatgtagcaaaatttagagcattagaaaaaataattaaatgcaatatggtaccctgggttatacctaggaactaaagaaagacagtagaaaaacaggtgaaatataaatgaagtctatagttaatagtaatcaattagaaattaatcaatgttaatttcttagttttgacaaatgtcctgtggttatgtaagatgtttaactttatggacaactggatgaagggtgtataggaagtctatactatttttgtatctatcttgtaaatctaaaattatttcaaaataagtttacttgaagcacaaaagtcagtttattgattcaaaatgtatagtttagaagtagattttctggaccatggtttaaaaaaataaaaaaaataatttgaaaaatccagattacataaaaacgattcaaggaaatacatggctataggtttcatttttcagtttataggaagtatgcaattttatttttttaacattggtgatatgctttggatttgtgtccctgcccaaatctcatgtcaaattgtaatttccaatgttggaggaggggcctgatgggaggtgattggatcatgagggcgaatttccttcttgctgttcttgtgatagtgagtgagttctcatgagatccggttgtttaaaagtgtgtaacacctcccccttcacactattcctcttcagccatgtaagatgtacctgcttcccctttgccttccgctgtggttgaaagtttcttgaggcctccccaaccatgcttcctgtgcagctcgaggaaccatgaaccaactaaacctcttttctttataaattacccagtctcagatagttctttataacagcgcaagaaaggactgatacaatgggcatggtgtttgcggacatctcctcgtacttggttacaggctttctctttgatactttaagccacttgtgttctttggtccttttgtgtaactttttctgttattccaagcaggccctttaaatggttcccagtacacttctttttcttttctttagtgtattgtttagagaaaaaagtccaataatgtgactcagtggtttggggttgagaccctgttagtgtagttttgttcagtcacactacttgagcttctaggtcaagtagtagacatggtagatgtattgttaacaagtacgaataaagatgaatataattcttacatatccatttctgtaattgagctaaaataatacagaatctattgctgtcagataatagaaattctcagtttctaaaatggactctagcatgataactattttaaatttctataaatattaaaagacttataagaaggaaactttgtagtttgctgaaactcttatgtaacttttcattaataaaagtaaagtagccatgcaggtcttgtagatggtttcctgcttctgctgccaaatttaatgattttagttaaatttcataaagggaaatataaatatattatacttaaaggatatagacacttaaaacaacagacccatgcctgaataactcttgcagaataattgtccggcttggaaatttctgtgttgcttggtagtctttagccagaattggtgttaacagtctcatgttaatagaattatagttaaagaattataatctattttttagttgtttaacatgattgtgctaaccttggttgggaagttgagaaaaagacaggatggccgggcgcggtggctgatgcctataatctcagcactttgtgagactgaggcaggtggatcacgaggtcaggagatcgagaccatcccggctaacatggagaaaccccgtctctactaaaaatacaaaaaattagccaggcgtggtggcaggtgcctgtagtcccagctactcaggaggctgaggcaggagaatggtgtgaacccgggaggcggagttcgcagtgagccgagatcgcgccactgtactccagcctgggtgacagcgcgagactccatctcaaaaataaaaaaaaaaaaaagaaagagaaaaaggatggttttctcaggccaagtttaaattacattgatcatgtaatagttcacacaaaacaagcaaacaagaaaaacttattattctgtgctagaagagcattaaaagtattgtttttagggacatgcttaccattcagctgattgtaatttgtggtcatcaaagtgtaaataagaatagctagtatatattgaactttttttttttttttgagatggagtctcgctctgtcacccatgctggcgtgcaatggcacaatctcggcttgctgcaacctccacctcccgggttcaagtaattctccttcctcagcctcctgagcagctgggattacaggtgcacgccaccagcccagctaattttttttgtatttttagtagagacatggtttcaccatgttggtcaggctggtctcgaactcctgatctcatgatccccctgcctcggcctcccaaagtgctgggattacaggtgtgagccatcacgcccggcctgaacattttctatgtaccaggcactttacttacattatctcatataatcttcataattacctatgagataggctggaattccctttacagatgaggctgagagagaagagctgtctccagtctaattctgagatggggaggcggacagaacaagtgcctattatgtacagtacctactgtttgttcatgatataagcagctcccaggaaatgctgtcatgtttccataaacacgtagtaaacttcggattatttcagcttttctaggtaagaatatctgatcacactgggtgacctagagtggattctcctggggtgagcagcctggagtaaggacttgtgtttcttgtctagctttactctggctcattctgcagtcccctaacatgtcagttgttctctgtcacctgattaattgctgaacactcattcattgtgtgcttcgttgatcatatgccaagaacttttggcagctctggggaacatgctctccacgtgcctcctggtaactgttggacaactagaagttcctagctgttgtgaaaactttgatccagaaactgcaacacatgccagagaccagggatggggtagttgaacagctgacaggtgaaatgtagctattcagattgttagttggtcaggagtcagaaatagagtaggcatgtgactctaaaaagtggtttttgaagaggattatgatggttggctatggacttcatagtttgtagacataaaataattctaacttctttttgaggaagagtcataaaagtacaaaatctcctttgctatcttctcttctttatggtctctaaaagttgacatttctcagggctcagtccttagccttctgtatttattttccacacgatctcatatgatcccatgttttaaatgccatctgttctcccaaatttacaatttctttactttggtctctcccatgagttctagacttatttttatgtcttttcaacatctccattttggagtctaataaacatttcaaacttagtatgtctaaaatgtaaatcttgaacttttctccctgggtaagtgatatacccagttgttccaggccaaaaactcaaagtcatgtgtgactttttattccatatcccacatccagtccattagtaaggcttatatgcctgcctttcaaaatgtatcccaaattactcctaccccactcctcacccttactgccctattgtaagtcactgtcataagtcacctaggtgataatatcgtcttctaaccggccttccttatctcctcattgtatctctccagtcagtcctccatataggagtaaaaggtgtttttttttttttttttaatgttaaacagtttctgtcattcctctgttcagaacccttcagtggctacccagcacacacaggatgaaacgttgtctcacatgttctaacaggcctgctgactttatctcctgtcactcactgtcttgctcactctcctctagccacacatgccttcttgctattccttagatactcccaagtccatttgtaatcagctagcttctcctggttccgtgatcccacacccctcactccaaccagtttagcctagtaccagtggaggtagatttagagagaagaaaagtgcatatccaagactctctagcacatgtatcagtagagtcacaataaaaatattacagctttagcattcctagttttggtaatttggattgctttcaagaataagaaggactggatttagatctacagaaagtcatagctagaatcaatggggaaaagttacagagagagatttctcctcagtttaaagagtgctacaaagagacttagactcccacacaataatagtgggagactttaacaccccaccgtcaatattagatcaatgagacagaaaattaacaaggatatccaggacttgaactcagctctggaccaagaagtccagatatgtcaaagatcagatggttgtagatgcatgatgttatttctgaggcctctgttctgttccattggtctatgtatctgttttggtaccagtaccatactgttttagttactgtagccttgtagtatagtttgaagtcaggtagcatgatgcctccagctttgttctttttgcttaggattgtcttggctatgcaggctcttttttggttccatatgcagtttaaagtagttctatccagttttgtgaagaaaggcagtggtagcttgatggggatagcattgaatctataaattactttgggcagtatggccatttccgtgatattggttcttcctatccatgagcatggaatgaaaactgaaattactttttgttccgtaagctgcaggatggatatcatgttagcaggcatgaaaacaacattaatgtccttgtacatctccattagagctgttgggtgactaggtgcattttcattgagcaataatattttgaaaggaatctttttctctgaacagtgactctcaacagtgggcttaaactattcagcaaaccatagtgtaaacagacatgctgtcatccaggctttgttgttccatttacagagtagtgtagatttagcataattattcatggccctagcataattcttaatggcctcaatgcaaatgaaacagccttatattcgaagacgatatcatataagactttcatagctagagagggagagtcaatgcttggcttcaaagcttcaaaggagaagctgactctcttgctaggggctaatgcagctggtgacttgaagccaatgttcatttaccattttgaaaataatacacactagaaatatggataaacttcaaaaacattatactgagtaaaataagccagatacagaacaccacaactgattccatttactgctctaggttagtatatcagaagtgtgagaagagataaatttactgtatggtgacaaacagtggacaagttgttgcatgcagctaagggtgggttgtgactgatctggaggcagtacaagggaactttttgggataatggttgtgttctatatcttgattctggtggtgattatatggagatataaatttgtccaaacccactgaaaagtacacttaaaatttatatattttattatatgtaaactattatctcagtaacaatgcttaaaaaaaccctggtacacaaattttgaaagttgttttactagcaaaagattaacttctgtctaatgttagaagacctttgtgtaatgctaaaacttagtcatcctgaaaaatccatttagataaatcagtgtatacaatatacataaagaatatatgaattaaaagtccctaaataaggaaagagagtagacgaattctcaatatactgtctagtctgtagtttgatgtattggaatcctcggaatgaattggtgtacatttccagtttcttgaatcgatgtttggtagtaccctggacactaagaagcagccagataaaatgaaataattacaactggttcttggttctgctttcgtgttcttaacttcttgagttgacttttatttcatgttttttaactagaaaaactggttagaagacataccaacataccaatgtcccttagaatctttttttttttttcggagacggagtcttgctctgtcacccagcctggagtgtagtggcacgatctcggtgcactgcaacctcggcctcccaagttcaagcaattctctgcctcagccttctgagtagctgggactacaggtgcccgccaccatgcccggctagtttttgtatttttagtagaaatggggtttcaccatattagccaggctagtctcgaactcctgaccttgcgatccgctagcctcggcctcccaaagtgttggtattacagacgtgagccaccgtgccgggcccagaatctatttcttcctttaggaatggatcccctagagtttagctaagcacatggctccctatctagaaactgtgcttctctgcttcttttacagcaacatgtggctgtgtgactaatgagaggttaatggtaatgtgtgtaagatcacctctgttaagacaagccacttaccctagactttcttttttccttttctgctggctgggatgttacaccagttacagtagccatcttagttggaaactactttggaaaccacgtggaagatggcagggccagcctgggtccacagatgatcttgtgaaacacaccttcccctgtcaccccatattttggcatgaaaaagaagaatttctttctcacttgagctacttttgagtctctttgttatggcagaaagtttatacgctaatataaaatggaaagcatttcagagttttaagtttttctttatactgtttgctatattgtctatatattggtatggtattctcaattaaagtagtttttaaaatacatatgattacatgccaagagttcctttttgattaattatttgagagaatgttttgcaaatttccaagttacttttaagcttttggtattaataatagaatgatgttaatatatggcattctgcttttctagatttttatggttgtatttctggactagcctatgatcagttttcgtaaagttacacagacctttttaaagaagttttctttatgagatacctaaatacctattatgttgttgaactttattatttttttgtctgatctctcaaaggcttaaagttgtaaatcactgatttcttccgtcaattttaattatttgtagttctataagtttttattttggtgtatgtgttaatgtgttatgtgttatttactgtcagcatctcaattgaggattataccttttatcagagtaatatgacttcttttttttttttttattaaataaagggtcttgctttgtcaccaaggctggaatgcagaggcacgatcatagctcattgcaccttccaatctctagggctcaagtgggcaatcctcctggctagctggtactataagtgtgccactacacctggctaatttttccttttaattttttgtagagatagggccttgctatattgcccagactggtcttgaacttctggcctcaagcgatccttctggcctagcctcccaaagtgctgggattacaggtgtgtgccactgcacccagccatgactttctaatttatgacttgtgttttgttttagctgacattgatattgctaccttagtttatatttctccataaatctgtgcttcccgttatatttacactttctttgtcattacttttagatatgtttcctaaaagtagaacatacttggattttattttttatcctaaaaagaactttgtctcttaacaaatatttaatgcatttaaatttgtttccaaattgttctgattggttttattgatcttttcagctttttgtttgaaattcttccttgttttcattgtgttttggattttttgctgttttgatttaaagttttatgtttaatttggttttcatttttaacttattgtgcatctaaggctttgaaaactaaggattattttaaatatttttttaactttaaatttatatgacacctatcattaacagttaagaataggatggtatctcttgataaatgagaaatttaatatgtttttacttatctgcttctctgttttcattaatatgatctaagatttttaactcaagactgttactaaattataattttaaataatttatgcacaatttattttattaacttttatatgggcataaagaatatgaaaaccctaagttgtcacaaccttaatttctactttttcaagtatttatcaaaaggaatcttaaaccatcaaaattatattctgatatcctattacttattattttgatttattttcatattatatctttaaaaaatactgttttcattttttctgttgcccacattcgaactatttctttgctcattagactaggagaaaagaagtagaaatagtcagatgtgaaattaagataccaaattatgtatttggtattttctgtagcaaagtctaaggtctggaacatgtttaggattattggattaatggattttatggtgatgggttttatggggagaattaccagttatttagtagcttgtaagcttgtgtcctaagatgtccctgtcaattactgcatcaggtaacacagggcgtggcacttagattctcattggtatttgttcagtgacagaagctgtcctctattgctttcgagtctctaagactgttttccccatcttgaatgtgcctagtcatctgacctcctctcaaatgggcaccaacttcattctctctgtataataagggaccttgtatggggctttcctagtttttttcagaacatgcttgaggaccatttagggaagcagggtcttagaggacattcagtcttgtcttggaaacagtggggaaggaagaactctgtagcagttgctaggggtaatattatatctttaagaaaacaatgctgtcactaagttacttttagacatggaaggcttctctttaatttttttttcttttttagtggatgattatgtagctagactaccaagaggtagggagtgaagtaaagctgagaacagcctctccaggattatcaggttagggtgaagttcttggcaagagactggatttagtgtggtattctggaaagcacatgggctgaggaggcaggagacctttattctaattttggttctctgttcttgtttctaactgtggcaaaccatttaacttttgtgagtctcagactagatttattaaatgaggaatctgactcaaagatcctttctaactttaaaattctgtgtctgaccagaggaccagggtagaacaaggaggtttctactcaatagcatttttatttttaatttcattttgtaaagtcaagaggaataaaccatttatcttactgctttgaacaggaggattagaagaaggaatcatatatggctcacatgtttatgttctgacttcgtattaggtaagtgacatgacgcatgttgcagtcgattgtccctattgtaacacatggaaataatctggtactagagtgactcagaggaatgtttgttgttgttgttgcttgttctgtttttgttttcttgaaacgattttactccatcacccaggctagagtgcaatagcttgatgatagcttactgcagccttgaactcccaggctaaagcgatcctcccacctcagtcccctgagtagctgggactacaggcacgcatcaccagcctcggctaatttttttatagagatggggtctccctgtcttaaacaggctgatctcaaactcttggtctcaagcaatcctcctgccttggcctcccaaaatgttgggattataggcctgagcacctgcacctagctgggaatgttaaatcaccattttttcctggagaaaacttgacagaactatttatctagattcccagaaggttatcaccttttccactgggatatgtgtgtgtctcaaaattgagggtactgggaggtaggcctgttgtgtgctaccaatcagccattaggctgcaggtcacactgaacatctttcattgaactcctgagtggtgaaacggctgctagcactaaagttgtgtttcacaagggcagtaacacgatgctgccctagctggctatctgttgtaagttgagctgggcatggtcacacgcagggtgggcagagagagttttcaaataatgaacatgtcacagttgtgaaagagctgggaacgagtgctgactgaataaaatctatgcagcaaagggtgactctttttgaagaaagactttgttctgcccggattctggaggaagagccaccggaacagcacagaaaagactggacagtgggctttggtcgcttttcttctctgtagtcatcacattgaggactaaaaattagttgaaaagttttatttccctctctatcaagagcttccgggggtgggagagagttgtttcatttcagaaatgtgttttgttttagtaaacacgtatcatgaattgaataaatgcaaataaaattcaaaataaattagaaacttgaatttaaaaatatatgtgataggcttttaagtgccactgtatggtaggctctggtagggatgcagagatcaacattcagtaaagtctgccctcaggaacttgggtgaggccaacatataaatggctaatatttattatgtttcattcagtttttgtggagcatctactctatgcaaggcagcaggacttacaaagtaaggcagagaagattgagtctctgttctcaaggcatttatagtcctgagggatatgaataaataggtaactagagtgccaggtacatgagggcatacaggggagaataatagaatgtgtgggattgactgtgttctgagattagagtgaggcagcctcaaggtgcctatactttcagatttctgcagtctttaagtcttctagaactacagcgttaactactggaggaaacattattgtatgtttttgtaggtatagctgctttatattaatgagtccatagctgagcatctggaaggaaaaaaaaattgttgatacatgtgctttctgtattcagctgatgatgaagatgatgatgatgatgatgatgattgaattgccctctactagctacaaattatatctagaattttaaatttgaaattaaagggagacaccttttgatcaaacattgttccctattaagttacagtaaaagtctttcttgaactttaaatctattaaaaagagattgcatggcctcccataatcattgaatcccatggctctttgaggtagggatttcctattcagcccagtgtcctcctattcaagtatgaggctgctttctctctgtcatcattgaagtcttggtctttttggacaacagtagaggcctgtaatatattttaagctggatttgtaaattgaaggggcccaggctgagtctggcccatggtgcatgtggcttacctccatgcctgagccacaaaaggcccactatttgctgtttttagggagttaataagagcttttgtgacatagttcatacacactttattggctaaaatctagatgatctgaaggaaaaagaatacgttgcaaaagtcaaagttatggctgtgaactagaagaaaagttaaaaatataaaaactgtcacaaatggtacaaacgagaattagaaattagcaagagcacagaagcagaggttttttaattatagcactccttaagacattttaaattgttataatgatttcaaataggtaaacttttggtcttaaaaggaatcaaggggccgggcgtggcggctcacgcttgtaatcccagcactttgggaggccgaggcaggtggatcacgaggtaaggagattgagaccatcctggctaacaaggtgaaaccccgtatctactaaaaatacaaaaaattagccaggcgtggtggtgggcacctgtagtcccagctactcgggagactgaagcaggacaatggcgtgaacctgggaggcagagcttgcagtgagccaagattgtgccactgcactccagcctgggtgacagagcaagactccatctcagaaaaaaaaaaaaagaatcaagggctctactttctgtgtgtagtttattaaatgtaaacacatacaaaatttaaggggaaaaggtaatctttttatgtgaaactgttttgatttatggcttccgagactttgaaagcctctttgcaccttgattaaatacaccgagtggttttaaaacctaataaaattgttggggggtggcataggcagatatttttaatatagcaattaggaatatcataaagaagattaaagcagtttgtaacataagccttgaatagtattactaaataaagaaaatgaggttttagaaatttgaacacgttaactataaaaaaagtaaactttttttcatgtaatactgaaatcaactatggaattgaagaaactatgatttttctttttaaaataaaattatttacagaggaaattcatgaatactttgttaaaaaacaaaaagcatttatgtcaggctaaagttccatttgactaccacccttctgtctccccagagatcatcattttgctatttattcttccaaattgtcttctaaatatttttatgcatatatatgtatacataccacagatggatatgttttttgttgatgtttaaacacagaatgttgattgctggttcattttaaatatggccttccgttgttatgttttatttttaatacttctgcagtattactaatagcagctgacacttactgcgtagttactatgagctaggcgggatgcttagcatttttcatataatttagcctcatcttcataataaccttcagaagtaaaatagtttattttatatgaataaaattctacctttagtatacctttcatttacagtaaattactaatgccagtagtttagcattctttaataagatttctaccaaaacatttggaatgattttttaaaattgctaagactgtaactgccagttctgttacactttttattcttgtgcagttggcctttaccaagtccccagagtcgggtgtctgcttgctaaaccagaaagctggagatatgaggatgattcttgctcaacttttaggaatgaagtggtagtatgtgtcctatttgactgattttaaatgaggaacagacaaccccagacatttcctcactagttaatggtttgaaaagcctatgcctgtgatgatgtccattttggggacagttataggagacaagacttagattgaaggtggttcccttttgaaagaagtcttccattgtgcccttggtcataccagtatgaagacataaagacgctgcaataggaactccaagaatttttatgggaattggtagaaaggggtattgggtaggttgagagaaaaaaaggttgtgcttatgtatatgctgattttggagtttggatgaggatattttccacatttcatgacaaaataaagagctgttagtgaatgggatagctctcagagagttttaagtctgagctctgctgcttaactagctgtgtgactttgaacagcttcatgacactgttttaatcaaataataatattcacttcatacagctgtagggtcgaaattacataaagtacgttagacattgctaagtgttttataaatgtgctagtattaggtggtgttcttactgttttcattaacataactgttgtcaaaagcttctacagttcacctctataccaaagacttaacctacttgcttctatcctttattacttgagaaaggttactatattagggttctgttattttcagaatagtaaaagaggacctatcacctcttttaacatttaacaaatattgaaggcctaatatatgtgtgtgtgtgtatatgtgtgtgtgtgtgtgtgtgtgtgtgtgtgtgtgtgtgtatcagccagcatttcttctggctgaatgctagtaaagaaaggatcatttatattaatagtaactctggaggagagaagaaggtcccagtaaatatcatttgccaaaggtctcagtaaatatcatttcattgtcatcattattcttcataggctttttaaaatcttttttgtcttcaagatttaaaaaagcattaattattaatatctgtccatttatgcaagtatttgtaaataaatgaatttgtaaatggttatgatgagacactgaaaaaaaaacaataaaaacttaccttgctttggtttggttttggttttggttatgaagtcacaaataacattcaatgggagtatgaggtttttatgtttaataggatggaacatgggttaaaaatgttaagaagtgctcatttccagagtaagctctcattttcagctgaggagactgagctccactgagcttgcatttggtatacttcggggtccacattctaatggggaactgattattgctggaaacccaatcaaaagtgtggtttattctgggtttgtttaaaattttccttcccactgttctgttttcctaatataagtattatagcaatttagaattcatggaaagaatgagcacctttagcttcttacagtgtcatgagactgcatatttgttattcagtgttcaagaaattaaccatcagttgtttaaggcaactaggaagtctacagtttaatctcatttactgttatttagtgatatgccatttagtatatgaaaacactgtgggtataggctgttggttgaagcagactatgtgtgctttggagggggcactttgccaagggaaaaaatcttttgatttttttgttccctcttctggagagttctcaaaatctatccttttgacttttattggcagttgtcattttcatcgtcatctccatattcttttattttttttgacttactctgtggcaaaccatctctagcctgaagttataccaatgaaaaaaaaatcttatttccaagtgacccatgaaattccattccatattttaaatgtgtcacattggaaatgccacttttttctccattgtatttttgttaccctaacccatgccctcaccatctgaggactgtgtgtatttttacagttaatagctctcatactcactggtttgtggaaactgagcatttcccctttatccagaggcagttgtggtaagtgtcttgttttcttcagatcccaaccacgggtctctaaaggtatctaagatctgtatggtcacatctgcttttccaagtaacagctagaaatattttaccatgccttcactatagctaggctataataaagtttacaatcagaggctgggcacggtggctcacgcctgtaatcccagcactttgggagggctaggtgggcggataacctgaggtcgggagtttgagctagccagaccaacatggagaaaccccatctctactaaaaatacaaaattagccaggtgtggtggtgcatgtttgtaatcccagcttctcaggaggctgagacaggagaatcgcttgaacccgggaggtggaggttgtggtgagccgagatcacaccattgcactccagcctgggcaacaagagcgaaactccgtctcaaaaaaaaaaaaaaaaaaaaaaaaaagtttacattcagttaaattctctaagcttctggcttagaatattgaagaaacttttacatagagtagataaaggatggagtaggaatttctgatttgattgtgtgttattgtggaaagaatgctttccctacagactgactaggaacaagatgtttaaacataagccagggtggagacctgtttggtcagctttataggagccacgtttccctacttaggatgagtttgccaactatcccatcaacctaccgctgcctgatccttcaagtgtctttggaatttttacttagggcactgttgggtaaggcagtgatatagtacatatgtagcaattaggctagaggctgttttgcggaacagcatgattttatcatgccgttataaatttatgctgtgctctgtgtatatatatataaaatgtctttttttcccctttttctccatccctctctgctcctggcttgtatattcacataactgggcagcagcaggacttcatttatcacaggcagtgggagggggtacagagctatgaaagggttactgttcacatttcctgtgtagttccttctgatcttactgagttgtaattcctttcttgatgttaaacattcccaggctccagtaaccttctggcctgcttgcactggccaagtgtgtcccaggtgatcttgtaggcgaacctcctgtttttaagacaagaaatcgctccttccttcatgagataggctaaatattcattcctttgcagtcccagaagaaatcctttaatttaaaacaacaccagagcagtaacatattagttttaaaattaaaatttagcagccatatttgttgtcaggttaattttgtagatttttgaatctattcattcgtagtttagtgactttctggttgaatgaaaccctattgccatattaaagattacatcttttcttcttaaaacacactttaaaaatgagttttaattctaaaaggataaattttggccctaccatcttacttttagcctacttatcagtagatcattttaagttgcctcagatgcaaagcagcttaactgtaactacaatatttctgcttttctttactagtcagctgttagaagtttgtagttgagcgttggggagatacttatttcctttttctctggttttaaaagtatatactggctcttcttttccccacaatttaaagtatataaatttttgtggttggcaaaaaggctttctgtttttgccttttcctctaaagttttagaagaaaatattacgccatggagcataagaatgggtcagcagctaatttacagggaaaaggagtacttttgccaatgctgccttaatctcaggtaaagagcttttgtttggacaaggctccaagggtaagtttattcttactgcttatagcacatctctttgtcctcagtcatcaacttgggaacctagggacttggggactgaaacgaaacagtatctctttgaaagagtttctaggataattttaagtttgctagtgtgtaggcaaagtaaactgtctgcattgctctaagcaatgagataaaatatttttagtgtaccttaactgtctggaatacagttttacaggggggtgggtagatgaatttttggattaaatctgtctaaatctgctttaaagagccaacatgaattgctgatattaatcatttacctttagttccccagtgcctaatacagagcctgtcacacaataggtttcctttctttctttttttttttttttgagatggagtcttgctctgttgcccaggctggagtgcagtggcgcaatctcagctcactgcaaactccacttcccaggttcaagcgattctgctgcctcagcctcccgagtagctgagactacaggtgcgtgccaccacacctggctaattttttgtatttttagtggagacagggtttcaccgtgttagccaggatggtcttgagcccctgatctcatgatccacccgcctcggccttctaaagtgctgggattacaagcatgagccaccacgcccggccccttgattctttttaacagcaaaagtttgcctatttaaaatcatttttttcttttttttgaaacaggagctcactctgtcacccagactgtagtacagtggcatgatcatagctcactgtagcctcaaactcctgggctcaagtgctcctcccacctcagcctcctaagtacctgagattacaggcaaatgccaccaagccctacttattttttcattttgtagagacagggtctcgctatattgctcaggcttgtctagaactcctgttctcaagtgatcctcccaccttggcctccaaagtgctgggtaattttaggcagtgggttttcaataatggtttgttgaatgaatgaatgagactgccagattacttttgtagattctattttttttacagtattgctaatagtaaagagtgatgcatttagtacgtacatctttgtatttttaaaaatcatttcaacttttattttagattcaggggttacatgtgccacaagatttgttacatgagtatattgtgtgatgctaaggtttgggttatggatgatcctgtcacctaggtactgagcatagtacccaatagttaactttttcaactcttgcctccctcctccctctctccttcctctagtagtccccggtgtctattgctgccatctttgtgttcatgtgtacgtaatgtttcactcccacttataagtgaggacatgcagtacttaattttctgttcctaagttaattcacttaggataatggcctccagctgcatccatgttgctgccaaggacatgattttatttttttatggctacatagtattccatgatgtatatataccacgttttctttgatggacaccttggttgattccatgtctttgctattgtacatagtgctgtcatgaacataggagttcatgtgtcttgtttgtagaacgatttattttcctttaggaaatgggattgctggttggatggtagttctgtttttaagttctttgagaactctccaaactgctgtccacagtggctgagctaatttacattcccaccagcagtgtataagaattgccttttctctgcagcctcaccagcatattatttttcgactttttaataatagctcttctcactggcatgagatggtatctcattttggttttgatttgcatttctccgatgatcagtgatgttaaacattttttcatatgtttgttggctgtttttatgtattcttttgagaagtgtttgtttatgtcctttgcccactttttaatgaggttatttgcttgttgaattgcttaagttccttatggattctggatattagacctttgttggatgcatagtttttgaatattttctcccattctgtaaggtctgtttatgctgttgatagttcttttgctgtgcaaaagctctttagtttaattaggcctcacttgtcaatttttttgttgcaattgaggtcttagctacaaattccttgccaaggccagtgtccagaatggtatttcctaggtttttttctcggatttttatagtttgaggtcattgttccatatgcatatgactgtgtgcatgtctacatccttcctgttaatctgtaatggtaggtcctgttcagagtccttttgtcattgaacagttaatttcctcacaacattctgtgcccaagtccttaggtgatctatacttggctgacctatccgtgacactgcttggtcatagaaaaaaagatttcatttagttatcgattaaagataatctgttaacatttcctgaacacttatattttcccccaggaaaatactaatgtccgtcagtcaacaaatacttgcagaatgctagtgtaaacagcattgtgcctggtattgtggactctccagagatgtgcatcaccttgttcctgccatctgaagtgtcctagacttctcaacgaagaggatatggacactaatcaagttaaacagcaacctaaagtatgttaaatatagttatgagctaagtgagaggcatggacaagaatcaggtagctttgaggaaggagaaatcatttttacttgaattagagagtgatcaaagatttaatggaagcttgaatagggcattaaacaaatagttggggtttgagtataaaagagtaaggctatctgacatttataagtaagggtgacagttatcacacttcctgtgccgagcagcaatgaagaaacaactaaaaaagagaatgcttgaagtgtgtggtggaaacttttcttcatcagtgacttatttgttccttattttctcctaaagtagaatttcagaaaagcttccacctaggacatgcagcagctatttcagctactataaggatcactttagtaggaaatcctcccagacttttcacccaagtaaaatttcagcaggaagacaggaataagatacactgaaaagttattgttcatgactacagtttgataataaaagcttgattcaatctcattggcaaaaaaaatttttttttttttgagatggagtctcactatgtcacccaggctggagtgcagtgctgcaatctgcaacctctgctgcccagattcaagggattcttctgcctcagcctcccgattagctgggattacaggcgcctgccaccgtacccggctaatttttgtagtttttagtagagacggagtttcaccatcttggccgggctggtcttaaactcctgaactcctgaccttgtgatccactcgccttggcctcccaaagtgctgggattacaggcgtgagccacagggcctggcctcattggcatatatactagtgctcactgctgagttatatcttgatttgaatcctaacatataaggagatatttccaagttcactatttttttacacgtagataggtggctatcgatatttgtcactatagataaatatcataatttgataggagtttctattaacctcttaaagtttctttttttttttttttttttttgagatggagtttcactcttgtcgcccaggctggagtgcagtatcacgatctcggctcacttcaacttccacctcctgggttcaagcaattctcctgcctcagcctcctgagtagctgggattacagatgcccgccaccatgcccagctaatttttgtatttttggtagagacagggtttcactctgttggccaggctggtctcaaactcctgacttcaggtgatctgcccaccttggcctcccaaagtgcttacaggtgtgagccactgtgcccggccaacctcttaaagtttctttcacaataaagcatgtactaatattacaaactattttagtcctattttttgttttgtaaaggagattttaaaatgaatataatttatattgagaccctttgattatatttacttattaaaagcaaacccattagtgcattttagagtcaaacatctacttgtattattttattatatagctaaaggaaaaataatgccacacagaaacgaaaccagtttttccaaaacagtaaagatggaatcttgagacagtctgctcactttaatttttattttatattttagtcttctggccagtagcaaattgatgtgaccttgtgcatgtttctctgaatatccacagttgttcagctgtatgaattgctgccagtgtgacaatgagccggaagctatatccaacttgcttctcacactgtatttttgtaaagacctagattctttcaagatattactaagtgatccgtgattaaaggttttggtggtttgctaattttaggaaaagtgggagcaatcacaatgtatattacgtagtgtatattggtattttatttaacccagtgtttcccaaatgtatttgaacttgggaacacccaccccctgtctttcttccttccaaattccttcctttcttactttatttttaaagaacacttactaaaatctcttatagaacaagtttcaggaatgtgcactatgaaactttcatacacacatgcacgttatttagatgtgttgcttatgtctttttctattaatctccaacttttctggggcataggttgggaggaagaaggaaagtgagtaacttacaagttttactagttattctgatgtcaagtttagtgggaaagaggctgaagcttatatctaaaataaggtttgagattgatctgagtattttaagagttcttactatctgtatcttctatagtttgttgctctgtacaagcaggagttgacagagcataacagaagttacctttatgggaaagagtaaggtgggttggaggtgaaataagacttttcgcttttgtaaccttaagaagaaaaagcaaattaaaagacctaaactgatggagagaaccagtactttacaacagaatttcttatttcaagcttttgtaagtactagcctctctggtagttttaaacgcattttgtttagaaagtaccaaaatttgtaaaactttttttttttttttttcttttgggatggagtctcactctgtcacccaggctggagagcagtggtgcaatctcggcccactgcaacctccacctcccgggttcaagcgattctgctgcctcagcctcctgagtagctaggatcacaggcgcacgccaccacacccggccaatctcttgtatttttaatagagacggggtttcaccatgttggccaggctggtctcgaactcctgatctcaagtgattcactcaccttggcttcccaaagtgcttggattacaggcgtgagccactgtgcccagccctattcttgtcttctaatacaggcaggttagaagggattctatcaaatttaaaatttagcactttttgtttaaaaaaaataaaatgcgattatacaatcaaagaacattaaagctggtagaagtttcacaaatcatttgtttcaggccaggcacagttgtgcacacctgtagtcccagctactcaggaggctggggcggaaggatcgcctgagcccaggagttcatggctatagtgcgctatgatcatgcctgtgaatagccgctgttctccagcctgggcaacatagcgagacctcatttctaataattttttaaaaaggtataataaattaaaaaatttttttttttaattttttttttttatttattatactctaagttttagggtacatgtgcgcattgtgcaggttagttacatatgtatacatatgtaaaaaaaactttttttttttttaagaaacaggcttatataaagtaagataaatctggtaagataagattaatatcttttgttctttatcttgtacatacctgttattaatatactatgccatcattgtctatttaagtgctaagtgagtaagtatatattatttttctctgtatctttggcacctaaccttgcactgtgcctggtacatagtaggcattcagtaaatgtttgttgatgtgagtgtcgggggtgggaaaacttaattttacagtcaatcctaggggaatacgttaatggttgaaatcttaaaaggattatgttattttgaaaacgtctttaaaatatagcctattttatttttatatttatatctatcttgtctaagaaaggatttaaggtggtattactaagtacacttagtacagtgggatcaaataaaatttaaaataaatgagtaaaagaacaaaattggaggatttatacatccccatttcaaaactcaatctaaggtgacagtattcaggacaacgtggccgtggcataggataagcatataaatcaatggagaggaattgagagtccagaaataaacatttacatttttggtccattgatttttggaagagctgctaagacaaatagagaaagggttattttttcaacaaatggtgctggaaaaattggatatcatatacaaaaattaacttcctcacaataacaatacacaaaaattagctgacaatgaattaggggcctaaatgtaagagctaaaattataaaacttctaaaagaaagcatagaagaaactttatgaccttggattaggcagagttgttaggtatgacaccagaagcatgagccataagataaaaaattgatgaatttgacttaattaaaattaacatttttatgctacaaaagacattgggaagaaactgaaaagataggctgcagactgggagaaaatatttgcaaatcatgtgtgataaaggacttgtatccaaaacatgtaaagaattataagtaaataataaggcaaacaacccaacttaacagtgagcaaaagaacagaatagacacttcatctgaaaagacatgagagtgattaatagccacatgtaagcacagtgagcatcattagtcattaggaagatacacattaaaaacacaatgagataccacaatgagattacatcccctaggatggctgtaataaaaaagacagtatatagtgtctaggatgtggagaaacaggaactctcatattatacattgttggtaggaatgtaaattgttataaccactttggaaaatagtttggctatttcttttaaagttaaaccaacttaccatatgtagtaaggttctccagagagacagaatgaatcaggtatgtgtgtgtgtgtgaagaaatttatttattgagacggagtctggctctgtcacccaggctggagtgcagtggtgcgatctcggctcattacaagctccgcctcccgggttcacgccattctcctgcctcagcctcctgagtagctgggactacaggcacctgccaacacgcccggctaattttttttttttttttgtatttttagtagagacggggtttcaccgtgttagccaggatggtctcaatctcctgacctcgtgatccgcccacctcggccttccaaagtgctgggattacaggtgtgagccaccgcgcccggccaaaatttattttaaggaattaattggctcagaaagagttgcagtttgagtctaaaggcagtcagctggaaaaccagaagagccaatgttgcagatgaagtctgaagggagtctgctggggacttcccttttgcccagggaggtcatccttttgttctattcaggccatcaactcattagatgaagctcccccatataatggagaaccatctgctctactcaaagtctaacagtctaaatgcagatcttgtccaaaattactcttgcagaaatgtcgagaataatgtttgaccaaatatctgagtgctgtggtccagccaaactgatacataatttttaatcattgtgccatataaactcagcaattccacttcttggaatctgcccaagagaaatgaaaacatatgttcacacaaagacttgtatgtaattgctcttggcaacattatttgtaatagatattaataaaaacaagaaaaaatgcaatgtccataacctggtaaatggataaacaaaatgaggcatatctatacattggaatactattcagcaatgaaaaaggaagaaaatattgatatatgctgcagcatggatgaaactaaaaaatatagtgttgagtgaaaggaactagactcaatagactacatattatatgatttcacttatgaaatttctagaaaagggaaactgattgagttagcaaggagattagaggggaactaggggttggagcaggaattgactgcatatgaactcaagggaattgggagagataatggaaaactggattgtagtgatgattgcatccatttagtacattctggtcctctataaatggactaaaacgtcattgaactgtcccctgttcaatggacaatgattaattttatggcatataaattgcacttcaatccatatcaaaattataaaagtagtacaaatggagtaaggatgggacacacattatatcttataaaagctcctatattttgcttgaggtggatcatggattttgctctaagctctctaagaagacatctctcaatatgaaatttcttttctgttgttcacaagatcaaaatttatcaatattttaggagaagcctaataattatattcaaaggaaaatgtattctttttgttatagtgcagtgtaatcaagtctgtccttaaataacatcctcatagtaaataactgaagactctcttctgaagacctgtttcttgagccccctttctatacagtctggtagcctaacatcaaaggcacattgataaatacagccctgttgagtgaatagggaggagatcagcaaaagtacaaggccaggaatgctattctttggtcgtatgactcagtcccaaaaatggaactacaaaagacctcgagtagccaaagcaacattgggaaaaagaacaaagctggaggcatcacactacctgacttcaaattatactacaaagcatttccaaacctcaagaaaaatataaatatccaggcacaggaaggtcaaaggtcatacagcctaccaagaccaaatcataatggaatagaacacctgagtacagcaataatgagtcacaaaattgaatcagtaataagaattagtccatcaaagaacagcccaaaccctgatgcttttcctgttgaacatttaaaatagtaataatgtcaattctcctcaaaatatcccaaagaatattaaccaatagtaaccaaaacagcatggtacacacataaaaacagacacataggacagtggtacagaatagagaacccagaaatccatgtatttacagccagctgattgatgaacatgctaagagcacacattggggaaaggacatcctctgaaataaatggggctaggaaaactggacatccatgtgcagaaactagatacctgtttcttaccaacatcaactcaaaatggattaaagacagactatgaaactattagaatacacaggagaaacacttcatgacattggtctagataaggtttgtatgggtaagacttcaaaagcacagacaaggaaagaaaaaataaacaaatgggattacatcaaacttaaagctctatacagcaaaggaaacaacagagtgaagagacaatctgtagaatgggagaaaatattagctaactacacatctgacaaggggttaacatccagaatgtgtaaggaatctgaacaactcaatagcaaaaagcaagcaaacaatctgaatgctaaagtgggaaaagatctgaatagatatttctcaaaagaagacatgcaaatggcaacagacatatgaaaaaatgttcaacatcactacatcagggaaacgcaaatcaaaacagtaatgagattatcatcttaccccagttagaatggctattaccaaaaagacaataacaagtcctggcaaggatgtggagaaaagggaactgttaatttacactgttggtgggaatgtaaattagtacagccataataaaaaacagcatggaagttctttaaaatattaataacagaactaccatatgatctaacagtttcactgtacggcttatatatccaaaataagtgaaatcagtatgttgttgaagagatacctgccctcctatgtttattgcagcactagttacaatagccaagatatggaatcaacctaagtgtttattagtgtatgaatggataaataaaatatgtcatatatacacaatggaatactattcagccatagaaaagaatgaaattctatcatttgcagtgaacatggatgaacccagaggtcattatattaagtgaaataagccaggcatctcatttatatgtggaatctaaaaacgtttatctcatagaagtagaaagtagaatagtggttaccactgggtggggaagagataggagagatgaagagaggttggtcaacaagtgcaaacctacagtcacataggaggaataagttctggtgttctatggtacagtagggtgactttagttaataataacatatttcaaaatacaagagaagctttgaatgttctcattaaaaaatgacaagtatcagaataccacactgtattccataaatatatacaattattatgtgtcaaaaataaaataaaactttaaaaagatgtcagtttggtcacacacatatttacgtaaacatagtttatcatttcactaacagtctctcttttatatttcatcacttatctcacattggtattttttatgttgtgtttgaaaatcactgctgtagagtaccataaagggtcttaattttctatttgtaatcccactcttgcttcaatcatgagaaagtgactgaataactgtgttaaatgaactgaaggagagcctgagcatgaatcctttggcttgattatctatgtacaatagtttatttagtaagacgaaaatggttataattgcagtgatttagttggagtatattgtgtttgaaaaattgtttgttttagaatatcttagagaaaattggcctctcagaaataattttaccttataatgaactttgcaaattgcttctgcaaaatcactaggttcaggtttctgctttcagttaggttgtagaaggtggtaatgggacattgtggcttctggaacaactaaaaaaaataataataagttacaaaaatcaacgttgtaataatatgttactacctaataaaatgccccaatattcagtggtgtgaaacagcaagtctcatttagctcatcgttctatgggttgaaaattcaggcaggtcccagcttggtgatttttggttgcatgtttcgttgactgagatcactgggtggtattctgctggtggatggaattctctggaggattcaagatacatatatacagggtgcctgggcagaggtggaaggctaagtctacatgacctttctagcatggtagtcttagcatagtcagacttattattgtggcttccggcttctagagagaattttcgtggagatagaaagtggacgctgccagcgtcttaaagcctaaaactgaaaaatggtaccatatcacttccactatattctgttggtcaaaggagtcacagagttcttccagttttagtgagagaagacataggcatgaccttccagtggaagaagtatcaaaacatttgtggccatctttaatccaccacagtccactatctggtcacaaatgattcagtctcttcctatgttccttatttactcacccacctccaagaatcccaaaattattttccaactcttctttaccctgagtcttaaagttcaagaacttgttatttacaacaagtacactgttcaggaatcttctcaggtgtagctgaagagacaactacccaacaatataatgaagaggcagtcatagaatagctgcagtaaacattcccattcacaaatagggaaacaggaaacatacagctttactggtccatagaaattttgatatactgatgttagttcttttattaggctattcttgcctcctgataatgattctccctggctcgaggttttgctctctcaatttagagtcatcctttttctgtaagaaatggtcattttttgcaactgagtagccttttcagcctttctgcctgtagaaatttgagagtccaaaagcctgttttcattttgcactatctctgtccctttcagtgcaagctgatataatgttttttaaaactttgtgggcttcctgtgtatcaaattgtagcccgctccattaatcagaggcccacccacatttattttagagaggcattttttttctttcatactgagtcaaggtattttgaaacaacacccataatattcctatgagcttttctgtctatttaagagtccaaagtgcacatcatcaagattcttagaggccttttgccttagaacagaatctaagtgtcatactcttaagattcttagaactgaactagatacgattttagtctttcagtctcaacaaggtgttttacagccatgctgtagagatttttatcctgaaaccacgctttactggtagtaggccccaagccttaatagtaattctgtaactctgaagctttttcttacatttctctctagagataatggggatgagaaactgtttagttttgaaaagatcaagtcctggttctttaaaaattttcctctaacttctacttgaaaatgaaacagttctttcatcagtttgtgtatccataacttatagatagctaaaggagaccaccactttcaacctttcgcctagaaatcttcttagccaaatttaccactttatgggggtatattttgtctttttttttaaacagtctcgcactgtcgcctgggctggagtgcagtggtgcgatcttggctcaatgcaacctccacatcccgggttcaagtgattctcctgcctcagccttctgagtagctgggattacaggtgcccgccaccacatccagctaattttttgtattttcagtagagaagggattacaccatgttggccaggctggtcttgaactcctgacctcatgatccatccgcattggcctcccaaagtgttgggagtacaggtgtgagccactgtgcccggcctattttgtcttttctatttcatgtgaggaacagtgttacaaacttcccactgcataagaagagttattcatctatccaccataaggttttcattaatgttgttcaaaccttcactaacagtcttcttaagtcacttccagcttctgctcacctctggtcccaaagccaatgccacatgtttgttttttttttgtgtgtgtgtgtgtgtatgtttttttttttattattatattttaagttttagggtacatgtgcacgttgtgcaggttagttacatatgtataattgattcttacatcattatgaaatatttctcaatactgctagtattatctcatgttttgaagtttattttattggctagtaatatagctccctccagttttcttaatgattagtatctgcatggtatctctttggattcttttacttttttttttaattttttaaattttttttattatactttaagttttagggtacatgtgcacattgtgcaggttagttacatatgtatacatgtgccacgctggtgcgctgcacccactaactcgtcatctagcattaggtatatctcccaatgttatccctcccctctacccccaccacacaacagtccccagagtgtgatattccccttcctgtgtccatgtgatctcattgttcaattcccacctatgagtgagaatatgcggtgtttggttttttgttcttgcgacagtttactgagaatgatgatttccaatttcatccatgtccctacaaaggacgtgaactcatcattttttatggctgcatagtattccatggtgtatatgtgccacattttcttaatccagtctatcattgttggacatttgggttggttccaagtctttgctattgtgaataatgccacaataaacatacgtgtgcatgtgtctttatagcagcatgatttatagtcctttgggtatatacccagtaatgggatggctgggtcaaatggtatttctagttctagatccctgaggaatcgccacactgacttccacaatggttgaactagtttacagtcccaccaacagtgtaaaagtgttcctatttctccacatcttctccagcacctgttgtttcctgactttttaatgattgccattctaactggtgtgagatggtatctcattgtggttttgatttgcatttctctgatggccagtgatgatgagcattttttcatgtgttttttggctgcataaatgtcttcttttgagaagtgtctgttcatgtccttcgcccactttttgatggggttgtttgtttttttcttgtaaatttgtttgagtttattgtagattctggatattagccctttgtcagatgagtaggttgcgaaaattttctcccattttgtaggttgcctgttcactctgatggtagtttctcttgctgttcagaagctctttaatttaattagatcccatttgtcagttttggcttttgttgccattgcttttggtgttttagacatgaagtccttgcccatgcctatgtcctgaatggtaatgcctaggttttcttctagggtttttatggttttaggtctaacgtttaagtctttaatccatcttgaattgatttttgtataaggtgtaaggaagggatccagtttcagctttctacatatgtctagccagttttcccagcaccatttattaaatagggaatcctttccccattgcttgtttttgtcaggtttgtcaaagatcagatagttgtagataggcagcgttatttctgagggctctgttcagttccattgatctatatctctgttttggtaccagtaccatgctgttttggttactgtagccttgtagtatagtttgaagtcaggtagtgtgatgcctccagctttgttcttttggcttaggattgacttggcaatgcgggctcttttttggttccatatgaactttaaagtagtttttttccaattctgtgaagaaaggcattggtagcttgatggggatggcattgaatctgtaaattaccttgggcagtatggccattttcatggtattgattcttcctacacatgagcatggaatgttcttccatttgtttgtatcctcttttatttcattgagcagtggtttatagttatccttgaagaggtccttcacatcccttgtaagttggattcctaggtattttattctctttgaagcaattgtgaatgggcgttcactcatgatttggctctctgtttgtctgttgctggtatataagaatgcttgtgatttttgtacattgattttgtatcctgagactttgctgaagttgcttatcagcttaaggagattttgggctgagacaatggggttttctggatatacaatcatgtcgtctgcaaacaggtacaatttgacttcctcttttcctaattgaataccctttatttccttctcctgcctaattgccctggccagaacttccaacactatgttgaataggagtggtgagagagggcatccctgtcttgtgccagttttcaaagggaatgcttccagtttttgcccattcagtatgatattggctgtgggtttgtcatagatagctcttattattttgaaatacgttccatcaatacctaatttattgagagtttttagtatgaaagtttgttgaattttgtcaaaggctttttctgcatctattgagataatcatgtggtttttgtctttggctctgtttatatgctggattacatttattgatttgcgtatattgaaccagccttgcatcccagggatgaagcccacttgatcctggtggataagctttttgatgtgctgctggattcgttttgccagtattttattgaggatttttgcatcaatgttcatcaaggatattggtctaaaattctctttttttgttgtgtctctgcccggctttggtatcagaatgatgctgacctcataaaatgagttagggaggattccctctttttctattgattggaataatttcagaaggaatggtaccagttcctccttgtacctctggtagaattcagctgtgaatccatctggtcctggactctttttggttggtaagctattgattattgccacagtatcagatcctgttattggtctattcagagattcaacttcttcctggtttagtcttgggagagtgtatgtgtcaaggaatttatccatttcttctagattttctagtttatttgcatagaggtgtttgtagtattctctgatggtagtttgtatttctgtgggatcggtggtgatatcccctttatcattttttattgcatctattgattcttctctctttttttctttattagtcttgctagcagtctatcaattttgttgatcctttcaaaaaaccagctcctggattcattaattttttgaagggttttttgtgtctctatttccttcagttctgctctgattttagttatttcttgccttctgctagcttttgaatgtgtttgctcttgcttttctagttcttttaattgtgatgttagggtgtcaattttggatgtttcctgctttctcttgtgggcatttagtgctataaatttccctttacacgctgctttgaatgcgtcccagagattctggtatgttgtgtctttgttctcgttggtttcaaagaacatctttatttctgccttcatttcgttatgtacccagtagtcattcaggagcaggttgttcagtttccatgtagttgagcggttttgagtgagattcttaatcctgagttctagtttgattgcactgtggtctgagagatagtttgttataatttctgttcttttacatttgttgaggagagctttactaccaagtatgtggtcaattttggaataggtgtggtgtggtgctgaaaaaaaatgtatattctgttgatttggggtagagagttctgtagatgtctattaggtccgcttggtgcagagctgagttcaattcctggatatccttgttgactttctgtctcgttgatctgtctaatgttgacagtggggtgttaaagtctcccattattaatgtgtgggagtctaagtctctttgtaggtcactcaggacttgctttatgaatctgggtgctcctgtattgggtgcatatatatttaggatagttagctcttcttgttgaattgatccctttaccattatgtaatggccttgtctcttttgatctttgttggtttaaagtctgttttatcagagactagtattacaacccctgcctttttttgttttccatttgcttggtagatcttcctccatccttttattttgagcctatatgtgtctctgcacatgagatgggtttcctgaatacagcacactgatgggtcttgaccctttgtccaatttgccagtctgtgtcttttaattggagcatttagtccatttacatttaaagttaatattgttacatgtgaatttgatcctgtcatgatgatgttagctggttattttgctcgttagttgatgcagtttcttcgtagtcttgatggtctttacattttggcatgattttgcagtggctggtaccggttgttcctttccatgtttagcgcttccttcaggagctcttttagggcaggcctggtggtgacaaaatctctcagcatttgtttgtctgtaaaggattttatttctccttcgcttatgaagcttagtttggctggatatgaaattctgggttgaaaattgttgtctttaagaatgttgaatattggcccccactctcttctggcttgtagggtttctgccgagagatccgctgttagtgtgatgggcttccctttgagggtaacccgacctttctctctggctgccgttaacattttttccttcatttcaactctggtgaatctgacaattatgtgtcttggagttgctcttcttgaggagtatctttgtggcgttctctgtatttcctgaatctgaacgttggcctgccttgctagattggggaagttctcctggataatatcctgcagagtgttttccaacttggttccattctccccatcactttcaggtacaccaatcagatgtagatttggtcttttcacatagtcccatatttcttggaggctttgctcatttctttttattcttttttgtctaaacttcccttctcgcttcatttcattcatttcatcttccatcgctgataccctttcttccagttgatcgcatcggctcctgaggcttctgcattcttcacgtagttctcgagccttggttttcagctccatcagctcctttaagcacttctctgtattggttattctagttatacgttcgtctaaatttttttcaaagttttcaacttctttgcctttggtttgaatgtcctcccgtagctcagagtaatttgatcgtctgaagccttcttctctcagctcgtcgaagtcattctccatccagctttgttccgttgctggtgaggaactgcattcctttggaggaggagaggtgctctgctttttagagtttccagtttttctgttctgttttttccccatctttgtggttttatctacttttggtctttgatgatggtgatgtacagatgggtttttggtggggatgtcttttctgtttgttagttttccttctaacagacaggacccctcagctgcaggtctgttggaataccctgccgtgtgagatgtcggtgtgcccctgctggggggtgcctcccagttaggctgctcaggggtcaggggtcagggacccacttgaggaggcagtctgcccgtactcagatctccagctgcggaggagccaagatggccgaataggaacagctccggtctacagctcccagcgtgagcgatgcagaagacggtgatttctgcatttccatctgaggtactgggttcatctcactagggagtgccagacagtgggcgcaggtcagtgggtgcgcgagccgaagcagggcgaggcattgcctcacttgggaagcgcaaggggtcagggagttccctttccgagtcaaagaaaggggtgacagatggcacctggaaaatcgggttactccctcccgaatactgcgcttttccgacgggcttaaaaaatggtgcaccacgagattatatcccacacctggctcggagggtcctacacccacggagtctcgctgattgctagcacagcagtctgagatcaaactgcaaggcggcagtgagggtgggagaggggcacccgccattgcccaggcttgattaggtaaacaaagcagccgggaagctccaactgggcggagcccaccacagctcaaggaggcctgcctgcctctgtaggctccacctctgggggcagggcacagacaaacaaaaagacagcagtaacctctgcagacttaaatgtccctgtctgacagctttgaagagagcaatgttttaagattttattacagaattccacttccctttactagattctgttatggttctctaattctgtgtaagaaaatacctaaacacatcccctgaagacacagccattttattgtacctcacaatttgtgggccagagaaaagggcaggttcagctgatggttattctttttcatgtagcatcacctgaggtcacttggtggccttcaactcgagaatgagctcaatgcggtctggaggataaaagacagctgtaatcacatttctgtcactttggcaaagataacccaaaacctagttttatctgggactgtctaccagaggacttgcatgtagcttctctagtataacagtcctacagtagttagattatgatgacagtagcacaaaagacaggaaggaggaaatagataaattttattacaaagtttttatattttgtatgtgacgtggtataatatttgaagttatgttgtggcaggttaaatgtgcatattttaaacacgagcacaatcactaaagctacaaagatacaagtatatttataataggccagtagtggagataaaatggaaaactaaaaagtattcaatttcaaatatggcaggaaaaaaagggaaaagggaacaagaacagattgggagaaataggaaataacaagataattcattcagatccaaccatataaataattacattaagtttaaatgatctaaatattctaaagacagcaatcatcaggctggataaagtagcaagacctaactatactgtctacaaaatattcccttcaaatatatacaaagtggttaaaagtaaaagagtcatgtgttttttggctgcatagatgtcttcttttgagaagtgtctgttcatgtccttcgcccactttttgatggggttgtttgtttttttcttgtaaatttgtttgagttcattgtagattctggatattagccctttgtcagatgagtaggttgcgaaaattttctccccttttgtaggttgcctgttcactctgatggtagtttcttttgctgtgcagaagctgtttagtttaattagatcccatttgtcaactttgtcttttgttgccattgcttttggtgttttagacatgaagtccttgcccatgcctatgtcctgaatggtaatgcctaggttttcttctagggtttttatggttttaggtctaatgtttaagtctttaatccgtcttgaattgatttttgtataaggtgtaaaaaatgctcatcatcactggccatcagagaaatgcaaatcaaaaccacaatgagataccatctcacaccagttagaatggcaatcattaaaaagtcaggaaacaacaggtgctggagaggatgtggagaaataggaacacttttacactgttggtgggactgtaaactagttcaaccattgtggaagtcagtgtggcgattcctcagggatctagaactagaaataccatttgacccagccatcccattactgggtatatacccaaaggactataaatcatgctgctataaagacacatgcacacgtatgtttattgtggcattattcacaatagcaaagacttggaaccaacccaaatgtccaacaatgatagactggattaagaaaatgtggcacatatacaccatggaatactatgcagccataaaaaatgatgagttcacgtcctttgtagggacatggatgaaattggaaatcatcattctcagtaaactgtcgcaagaacaaaaaaccaaacaccgcatattctcactcataggtgggaattgaacaatgagatcacatggacacaggaaggggaatatcacactctggggactgttgtgtggtgggggtagaggggagggataacattgggagatatacctaatgctagatgatgagttagtgggtgcagcgcaccagcgtggcacatgtatacgtatgtaactaacctgcacaatgtgcacctaaaacttaaagtataataaaaaaaagtaaaaaaaaataaaaaaaaaaaaagtaaaagaatccaaagagataccatgcagatactaatcattaagaaaactggagggagctatattactagccaataaaataaacttcaaaacatgagataatactagcagtattgagaaatatttcataatgatgtaagaatcaattaattaaagagacataattttaaatgtctgtaagcctgatactaacagagccttaaaatacttgaagcaataatggacagaacagaaaagagaaatagataaagctattacagttagttttctcaacacttctctttctcacttttctttcagttgctagaacaagtaggcagaatatcagtaaaaaaaaaaaaaatctggaagagtactgtaaagtagaaaaaaatcaacaaaaccacaaaaccaaaagttgtttctttgaaaagaataacaaaactgataaacccctactaagaaaaaaaaagaaagttcaaattaacaatataagaataaacaggaaacattaatagagatccaggaaatatataagggataagaaaatatgatgaacaattttgtgtcaatacattcgacagtttaatgaaataaacagattccttgaaacaaccgtttctcctctttgacatgactaactgcactaacgttcttgttccatcttctcttgaatttgttccattatttagtactctcccttgaaaaatacagcataaaaatgactcaaaagaagtaaaaaatctgaatgctgctatatctgttagaggtatcaactccttaattagaaatctccccacctctagtggcattcgtcaactgaactgggtctcattattaagtccttgaatgtgtctagaaattcaaaaccactgtagctggcgagttctcccctcaacccaacccccatatagttttcttcatactactttctatttatttactttacatccctgttggtggagtttgaagggaccaattaattatatcacttttttattcttacctctgaactctttaagaagtagacttaagataagaacgaaaatgtcagttttgtttatagagaaactaggtaaaagagtacacctagctttgcatctagtcttcctaccccttcaaattggattgacttaacttgccctgtagtgtttactatgtagatgactggacaatgaatttgcatttggacaagcaagttctgagagtcagagactgttgacacatgtggccagtcttttgccgaaacagatgtgtcagaaagagggagagagattggtgttttgtcacctacaacttaggtgacgccctactcttatgctctctttttccaagcagtcgtgctcccagttcagatggaacccacaattagtccactgctgacttactttcagttccttatgtcatttggaccttatgctctattgtgaacaagttattagaactttgatcttctctcataactcttttcccttcacttccctagaaatttaaacctggcattcaaaggccgcaatttgtttgtttgtttgtttgtttgtttgtttgttttaccatctcaagaaaaagcatggcatttaaaaaatctaggttttaaaggaggcttgatgtgtacctttgctcaccagtatcaattcaaggctcagcatgccacctttgttccttagttccttttcttataactctttcactaccatctcccttttctaattcctgttactggttgacttccaggacactgctccaaattcttcaatgatgtcaccaccaggcttgaaagtaatgtcaacccacactatgtgactataatctgtttctccaaattcatattttgagtttctgatactcagaactcatagtgttttaactgtctcagttatgccaaccagaattgttccaatatcttaaatactaaaagcccctcttttctgttttcttcttctctggcaatttttttctcttaaaactcttaaattcaagtattttttccattcatatgctttctcttcatctctttttctcccttcttctctcctcctccctttccctctgtctcaatagatggtcttgccattgggtctgaattccctcaactttactcccttacacacaaatgtttgtattcatcacccatcctttcctctatttctaaccatagagaaacaactgtttcttctctttaacatgactaactgcactaaagttcttgttcccatcttctcttgaatttgttccattatttagcactctcccttgtatttcttcctgttactagcattaaaaatgaaaaaaaaacagcaccaatgacaaaaaccttgttaaagattcagcttcactttcaaagtataccagacttcttagaagactaaaatttattggttaattccactttttctccttaaattggaagtctttgtttacttttattgcctttctgaaacgtattccaaaggtcactagtgattggtaagttctcagttcttctgccttgaaaaggcaggacagggcgctctcttcttttgctcttctttcgtgacttcagtattttgtggaaggcctcttctaaaataaaccttttaggagatgtgcaaactgttctattgacttagtgcagcaaacaagactacacagatgattctgaaatgatgcctccttagagaaaatttgtataagatttttattataggttggagatacgaaattctaggacaggatatcagaaatgacgcaagtcatcggattgattgatttcttaagttcatggttcatgtaaacaatgcatgattctgattggaaagaaaggtctattgtggtctaagaatcctatgtttgtaaccatatcactgaatgttggtgatggtttcacgtctcagtcttgcataattgtttaggctgttattctgcttctcactttcaagtatatttcagagaattttaaactttttacttttattgcagttactctgatttcttctcatcttgactaccgtagtaacaaaatagatctcactgctttttgaattttctcatggtaacttacacttgaaaaccagagccatcttttaaaatacaaatttgaatgtgttttctgccaaacacccttggtgcctctttatgtataaaataaagccccatgtactgaatctagcattcaacctcttacagtataatctcagccccaaatcctagtccttatcgatctccctccccatttctctctttctctttgtattcagtccataaggcagagccttcccacattttccctgtagtaattatcgtgctccaaaatcccgtagcgccttgtgtcacttgtagcacttactacatcgcctcgatacagagtttttcatgtttgcctgttattgtggtttgtatttcttaagaacaaaaactgtctcttattcaatttcatagctccctgttccccatgatactgagtagggcacaaatgccagctaaattttaaataattcagtttaaatcaggcttaaatatctaataatatattttctagaatttttagcaggttgacataaaaatatgtgaagacaatatatctcctattttagaagtctttgagcacagcttgagatttttattttaggttcttaaattatacgtggtataagaactgtaaattttacagaacttcgtagaactcttttatggtctttcaggtgcagtcatctaattggctcctataaggtacctagaaattctttataattttgttatttccactacatttgttttcagataaaaatgaatgccatttcccatccagtactgaagtgttaaagttagaagacatttgctaagtcaaatcacttcaggtaagtctgctcacatctagcttggtaccagcttaagatttatttaaaatgcaaagaattaagtttactaacttggacatctcaactctcaaatttctcagcatatcttctagtcaccttgtatattgaatcactggtcttgggaaatagtggaaagatgatttcttattaaatttcacatgcttataaaaataaaatgttctggccaggcatggtggctcatgcctgtaatgccagcactttgggaggccgagatgggtggatcacctgagatcaggatttcgagaccagcctgaccaacaaggtgaaacctcttctctactaaaactacaaaaattagttgggcatggtggcaggcgcctgtagtcccagctacttgggaggctgagacaggagagttgcttcaaccctggaggccgaggttgcaatgagctgagatcacgctactgcagtccagcctgggcaacagaacgagactccatgtcaaaataaaataaaataaaataaaataaaatgttcagttttaaactcttggtgttatttgtctaagtgagactaacaccttaaaatcatccttgtatttgtatcaagtctagtcgttaagtcctaagtgccaaacaatgcttttgcgttgtagctaatatatatatatagttttttaaggctttatacaacttttctaagttatttatatgttcttatttaaagaaatattttgttaattaactagcacttgaaccttaaatgtttattaactgtttgtgtaaaaaatctttgaaaggtcatcttaatcaccctcaactcttatagtgatctcctaataatctttctgtattcattctctcttcccctgtcctgtgttcattgttagataaacctgcatatagaaccacttttagtaattttaaaacgctttaatggcttccaactccctcttggatggaatccatgttcgtttgcctagcattcaaagcctcccacgaagatcctgaaaatgtaccccacttgagccaactgggcttttcctattctctgaactctcattgttcttcatgcatctgtcttaacttgtactggttttcctgcctgtgatgtcccctgctgccctgacactatttcctctgcacgttgaaaccctgtgcaagcctctctatgacacgttctctgattactccagctagaagcactagctctttctctctctgccagtgtcatctaatgttttgtttgtatcaccgttgtggcatattttaccgtgtagctttattgtttgtgtttatgtttgtcttatctcccaccctagattgtaaggactataaaatccaagatcttgtctgatttttgtttcctacagctttcaccatagcctttaatagtgcttagtaaatatttatgtaataaattaagagtgtgctggctttttctctcatcatttcctttgtctttcatccttataaatgcatatgttccatattcttggcaaccatttttgttctgcactcctggttgccatcttctcctaggaaaatactgaccttagtgcagttaacaagatacagtcagttcctgacccaagaaatgcactgtattccaaaagttcatgtctagttctgttgtttggaatgcagaatatatttttccacaaaaacaatgttataaatagtggttaggttctcagccagccctcccaagactatttaactcactggtaccagcaccactttcactatgggcagccatggtgtacaatgctgttttgtggagagattgtagctctggatatggagatatatctcccatgctctagaaataggacagaaagtttctgggcaggttgaacagtaggagagtctgagctggacctctgacagcattggatactctcccatcagaagcttcttggttttcagtagttacaggagagacttttacctgtaggttgctgatactctcatgtcacctaaattgagggcaaagggacacttgctcttctgatctttcccacagttgattaggatggtaaatggggttttctctatcctttcacatgggtgggttgtttttaagtcaggtattgaaagatcagggactgtttcactaattcctccttttggatgctatacaaacttatgggaattgaatatataaacatggaaaatacttctatctatagggagaaaaacacatttacaggtatcacccctgtatttgacatcacatcagtttttgtggacaagggattatcatttacataggcataatgatgcttctagtgagaaacacgtcagtatgcacataaacaaccctcaaggttgacgattgaggttgtcatgctgtaagaaaaaacacttcataaatttcagagaatttaatttattcagtcataagtattgagcacatgagtgtctactttatgcttaatactgtggtcaatgctaagggctaggaagtgggaacaaaagatgttatagtttgccttcaggccaggagcagtggctcatgcctctaatcccagcactttgggaggccgaggtgggtagatcacaagatcaggagattgagaccatcctggctaacacggtgaaaccccgtctctactaaaaatacaaaaaattagccgggtgtggtggtgcatgcctgtagtcccagctactcaggaggctgaggcatgagaatcacttgaacctgggaggcagaggttgcactgagccaagatcgtgccactgcactccagcctggcaacagagtgagactccatctcaaaataaataaataaataaataaataaataaataaagtttgcttccctgggaagtctgaaatatagggagcaaaatattaaacattcacattgaaaacaatatatgattaattgccataaaatgcttcataaacataaaaaatgccttttggattatcagaatggaatatcatatccccatggttgtaaggatactggtgggatttcacttagctttagaagaatagtgctagagctaggccaggcatggtggctcacgcctgtaatcccagcactttgggaggccaaggcgggcagatcacctgaggtcaggagtttgagaccagcctgaccaatatgatgaaaccccatctctactaaaaatacacaaattagccaggcatggtggcgtgcacctgtaatcccagctacttgggaggctgagacaggagaatcgcttgaatccgggaggcagaggttgcagtgagctgattgtgccattgcactccagcctgggcaacaagagagaaactccatctaaaaaaaaaaaaaagagctatagaggaaatgatattccaggttggattaaccgcatgaatagagaactggcaacacaagcaaacaaagcattactgagcggagcagagtggttaattcatgttggctgaaacaatgggggtgcggggcagggaattagaccgctggttcaaccctggcagtagataagagtcatccatagatatttttaaagatattaagtccctagatcttagcccagaactagtaaatagagtttcaggggcatggaacataaacctgtttgttttttaaagctcccctcgtggttctgatatcatccagggttgaaaatccttgaattagaagaatgggccaaatttaggagaaccatgaatgccctcctgaggagttgagcctctgtccctcaagcactgggaagactatagaggtttctgagacaggtgacatgatcaaattggtgtttgccaagataaatgatttgtcagctacatgtgaatggaagagaaataagaaacagcttgaattagagcagtggtcgtggtaataaagagaagagccacctttttaagtgtagttagatgtgtgggagctggtgatgtcagccttgacctcagcatgatctgttttataaactgattatacagtttcaccctcattaatttgatctctttactcattcagcctggcaacttaaatagtaatttcagccagtttgcatttaatggaaggagaccattgtctactcatgtacccgtctaactcataatagtaagtgaagttatgtgtatgaggaatatgacctttaacataatcattataaagcatttaataacctcccacatatgcaataacacaaccccagtcctgtatgattgtgccaagagccagaatcacatgtataaagtagttattagcacacagttccctagcattaagttgaaatttgaagaaatgttctaaatcatgttatgcattttaatatttttagcattaaatttgataattacataattttctgatgttagacccaagcatgcctcctgactacagcacctgttcttactctgaatttatgcttctctttggcaaggaatgcagcccctcaccctccatttgggcccatcccctgctggtgtcaatccattagcacccctgccctaggctcatccaaagggataactgggccagcagagaggagttgtaaaggagtcagaatttcttttgtggcacagacacacaaaggatcttggtggttcttttgcttctggtccaagaggaacacgatagctgctaaggtacacacactgaggagtcccaagtctcaccacaggtgagaaacatttcatatctctttgatgtgtttaaaatttttttatgtttggaggcaatgaaccacattaattagagagcagagaataagttcaaagcataaaggtttgacgtgacctgcctccttttaaaaaaaagctcaacatcataaaatatttaaaaacagtgacttttttggcaattctttaatagtacacatgtgacaacagtttctaccatggtcttcgtccatgacaatacgtttattgttgttttattaatatctccacatcctatgaattacatttttttttgagacgatgtcttgctcctcccctaggctggagtgcgatggcgcaatctcagctcattgtaacctccgcctcccaggttcaagcgattctcctgcctcagcctcttgagtagctgggattacaggcacctgccaccatgcctggctaatttttgtatttttagtagagacggggtttcaccatcttggccaggctggtcttgaactcctgacctcaggtgatctgcctgccttggcctcccaaagtgctgggattacaggcattagccaccatgcctggctgagttacatttctaatagctatttagatttctgctaatcacccaaatgcttaaccagaaagtggatggtttgtttagatttgagggattctgtagtagagagggaagagaaagggggtaacatttatcaagtgcccactttgtgccatgttctttacatgtatttttccactttaactccattttgcaaatgagcaaatcgggctttagaggtttaaaaaaaccgaagtcataagtcgagttggcaatagaaactggatttgattacaggtctggctgtctgactgtctcatcatcctggtcttagaaatcttcatggcttttatttgtgaggtaagatcagtgaactcagaattaggaggtttgagtaccggcttcacctcttctatagtttggatgtttgtcccctctgatatggtttggctgtgtccccacccaaatctcatcttgaattgtaatactcgtaatttccacatgtctaaggagagacctggtgggaggtgattggatcatggggcagttcccccatgctgttctcatgatagtgagtgagttctcacaagatctgatggttttataaggggctctcccctcctcactcctcatgctttctcttgcctgccaccatgtaagacgtgcctgcttccttttgccatgattgtaagtttcctgaggcctctccagctacatggaactgtgaatcaattcaaccttttttctttataaattaaccagtctctggtatttctttatagcaatgtgagaacagactaatacactctccaaatctcatgttaaaatttgatccccatgtttgaggtgagacctaatgggaggtgtttgagtcatgggcgcagatccctcatgaatgtcttggcaccctccttgctctgttcgtttccaccaagagctgttaaaaagagcgtggcacctcctcccctcttgcttcctctcttgctatgtgatctctgcacatgcagctctcccttttgcctccagccattagtggaaacagcctgaggccctcaccagaagccaaacagatgctggaactatatgccttctgtacagcctgcagaaccatgagccaaagaaggctgtttttctttataaatcacccagcctgacatatttatagcaacactaaatggactgagacaacctctgtcactaacaaccttgaacaagttatttaacaccactgagcttgagtttcctcatctgtaatatggagataaaacctgctttaccaaccatttggtgttgtggtgagaataataagctagggagtttccaaatgatttcataggtatgaaaaccaatagaactttcagagatgtttaattcaagcaaaatacaacaataacaacaataaagattaaatgagatgatttggacatattttatggtattttacttcctagcattgctctacaaacttactaaaagtaatgttggtcagatttgtaagttccaaacactgtggtattccaagctgtctcactgtgcatttaatacctcagtgtagtagataatgtcctggcaacatatcaagtacctgttttcacttgccagaagcaatcattagtttctataccatagcaaataggtctgaactctgatagatactgaagaaatgtttgtagccaatgagactactaactagagatatggcttattggattagagttgatattaacattctcagaacaatttttcttacatttttgaagttttagaacacacctgaggaataaagacatttcgtgaaactgtttttacaaaactgcttttcaaaaatgtttacaagtttctgaacaagttttataggttacaatatggtgagtactgcaagacagttatgagctattaatatcaacttacaaatgcttcaaatatatgtatacaagaggtaagaagtttggggaactcaataaattgtaaggatagtgctgtgaatgaagtgacagtgagcctgagaaatgttaaagtcattttcctagccttacacaaaacctttacccagttaaagctctaagtcttttctacatgggacaccaaataacgagtagaggagcagtattatgcttcagatacacagatacggatcaaggagagtgcacccatttgggcttggattcctgagtgcgtgcaactcttctgcatctgccaactcggtacatcccaaagagggttccccagtcctcaagtgctgatttctttttttttttttctttttctttttttgagatggagtctcactctgtcgcccaggctggagtatagtggcgcgatctcggctcactgcaatctccgcctcccgggttcacaccattctcttgcctcagcctcccgagtagctgggactacaggcacccgccaccacacccggctaattttttgtatttttagtagagacggggtttcaccatgttagccaggatggtctcgatctcctgacctcgtgatccacccacctcggtctcccaaagtgttgggattacaggcgtgagccaccgcgcctgtcctcaagcgctgatttcagtgtggctcccagtgcccccactgtgcctgctttctatatctggtagatgggtagctgcaattggggccaggtcaagtgaagtgtaaggggcagtagacatggaaaacaaagaaaacatacaacagagattgcaaaaatctggacctcttgacaagtttggtttataaatgtgttttctgtagcctgcatagcctgcgtaatgttttttattttaattattattaattttacagacagggtctcactctgtcacccaagatgaagtacagtggccttatcataactcacagtagccttgaactgctaggctcaagcgaccctcccacctcagcctcctgagttactggaattacaggtgcaagtcatgatgcctggctcttttgtttttaaagcataaattgcttgttaacaagtattattttgactagtaactgatataatttgttgttaaataatttaatgcacaaatccatatttccacattctcttggaaactggcaactttggtcctgctcttgcatgtggcagtaaccagctagagctaagtagaagctgcctctattagatgggaggctgtgcttttacattataggttgtaacctataacacccctggctgttgtttttctttgaacagaatttagaggaaggtttaaatgttacttataccaccatctgtgttaaaattggaaatagcaaattgattggatgacatatttcaatataagtgagagatggtattaattttctaggactacataagcaagtactacaaactgggtggctttaaataacagaaatttattctcttatagttctaaaggctagaaatctaaagtcaaggtgctggcaggaccatgttccctcagaggctcatggggaggattctgccttgcctcttctggcttctggtagccccaggcattccttgccttgtggtagcatgatgccaatctgattccatcttatgagtgtcttccctctgtgtctgtctacatccaaattttcctcctcttgtgaggataccagtacattggattagggcacaccctaacctggtatgaactcattttaacctgattatatctgcagagaccctatttccaaataaggtcatattcacaggtactgggggttaggacttcaacatatcattttggggtcataattcaacccataactgatggcatatttctttgtagagtgcagagtaatggttaagggcagggttccttgaggcagagtgctgcattcaacttcacaacttatttgctatgtgatcttgggtaagctgattacccactgcctcagtgctctcatctatgcaatgggatagtggcacaatcctgtaaggttattataggattgcagtaaggacaaaataagttaacatatataaagcacttagtacattgcctggcacatactatatgctcaataaactgaactattgttattattagctcttattcatatgtaatttaaatgtatacaaggagtaccagtgccaaaaactattatttaagatagcattatgaaaccatggaaaaaccagggatagtaggtagaattgttgcatgaaaaaataaaaagagagagactagaattttaataagtttttttttaatgcatacaactgtaatactttaaaaatgttagcctgctcactcttttagattacctgcctggcccctatatgcacttgaagctaactgaagacccaaagaacttcaaacccagaagcttagatattgcctgttgggttgctgagcacaatggcctgtaggtaataatgaaggaagttactccagggagagtgtccaaggaacactgacttctaagtcttcctacttgtctccttgggagcacgttattaccctctaccttctccttataaatctttagattaaaattatcctggtccccagtctctgggtcagagattgagactgaataattctttgaatttaaattatacgtttcctcccaagggaacaaatattttgagatatattatttcatttttccacatagactttacataaaataattacacaacttgatctttattaacaatctgagagctctgatagagaaggtgtaaagaattggcaagaatgtttgacgtacctggaagaaaactgttcagtaggttagtggctattgggtttttcgtactatagagtatacatacacttcattctcaaagatactgctaccttgaagacgtgaatattcaactaaagtcaaaggatttgacctaaatggtgaaagggacacatgcaaacgttatttctgatttgcgattttattggaataaaagaagttagggtatttaatttggggcaaaaaaaagtgttatttctgttgttcaagtattagtaattggaacatttagattcaatgatgtgttcatcaggactgcttcagttgcaaatgaaagaaagccagctcaaaccagtttatgaaaataaaggaaacttaattgtttctgtaactatggtttccagaggtgcatctggcttcaggcatggtttcagccaaaaactcaaatgatctcatttggactccttttcctctgctggtttcattatttgtcatttttcagacaggcatggtcagtaagatgaccactagcagctcaagatggttgtccatccaatttagcaatctcaacagaaagagaacctgtcacaccaaatgtctacctacctgcctcagagaagatgtggattgactctctttgacctcatgtgtcactgtggcctgggaatggggtaaactggtgggccacccttggtatgttttcccagtgctccagtagaggggcatagcccagtgactgcaagccccgtgagggtctcacagagtaggagaggctttctccaaaggaaccagaagaaaaatgggaatgtgtgcttagcagaccaaaactgtcctgacttcaaaccattaaaaatggtatgtgaaatcattcagatggcagtttctggttttaggaaagaaccatttgctttttttttttttttttttttttttttttttgactgagtttctctctgtcgccaggctggagtgcagtggcatgatctcggcttactacgacctctgcctcctggattcaagcttttcgcctgcctcagcctcctgagtaactgggactacaggcactcaccaccatggccggctaatttttgtgtgtgtgtgtattttagtagagatggggtttcaccatgttggtcaggagggtcttgagaggtgacaacatgccagcagccctcgcttgctctcggcacctcctcaggccatggcgtccactctggccacgcttgaggagcccttcagcccactgctgcactgtgggagcccctctctgggctggctgaggccagagccggctccctctgcttgtggggagatgtggagggagatgcgcgggtgggaaccggggctgcgcactgcactcgcaggccagtgtgagttccaggtgagcccaggagtgtcggccctgggcagtgaggggcttagcacctgggccaacagctgcggagggtgcaccgggtcccccaacactgccagcccacccacgtcgtgcttgaattcttgccgggtctcagccaccttcccgccaggcagggctcgggacctgcaacccaccatgcctgagccccgcactccccccccacccccgcccccaccaaatgggctcctgccaggcctgagcctcccctacgggcaccgccccctgctctgcggcacctgctcccatcaactgcccaagggctgaggagtgtgggcgcgggactggctgcagctccacctgcggccctggcgagggatccactaggtgaagccagatgggctcctgagtcagttggggacttggagaacttttatatctagctggaggattgtaaatgcaccaatcagcactctgtgtctagcttggggtttgtaaatgcaccaattagcactctgtgtctagctaaaggtttgtaaatgcaccaatcagtgatctgtgtctagctaatctggtggggacttggagaacttttatgtctagctggaggattgtaaatgcaccaatcagcactctgtgtctagctcagggattgtaaacacaccaatcagcaccctgtcaaaatggatcagtcagccctctgtaaaatggaccaatcatcaggatgtgggtgaggccagataagggaataaaagcaggctaccgcagccagcagcagcaacctgcttgcatccccttccgtactttgtttgtgaaagctttgttctttcactctttgcaataaatcttgctgctgctcactctttgggtccacactgcctttatgagctgtaacaatcaccgcgaagatctgcagcttcacttctgaggccagcgagaccacgaacccaccaggaggaatgaacaactccagacacaccgccttaagagctgtaacactcactgcgaaggtctgcagcttcactcctgaaaccagccagaccacgaacccaccagaaggaagtccgaacacatctgaacatcagaaggaacaaactccgaacacacgacctgtaagaactgtaacactcactgcgagggtccatggcttcatcttgaagtcagtgagaccaagaacccaccaatttcagacacagtcttgatttgccgaccttgtgatctgcccaccttggcctcccaaagtgctgggattgcaggcataagccactgtgcctggccaccacctgctttcttctattaaaatcttagcataaaacaaaggaaatagaaacaaaaattccaactctttttgtcagaggtagatctcatcagttaccttaaaccataaaatctgaaacagaaagcatatgatacagtaacttagtaccagaagggcaaaaccaaagcacctgcagaggagacgacagtgatatcaggaggttgaaggaggaagggaggcatggtgctaaaaacagatgttcagctgaaagtctgtgaaaggaccagctgaactcccaggtcttcacctcactccagctggacagcaatgttccccaactccacgagatgaggggtttgttctctgaaaaaattggaactacagagaatctagaccaggactcggggacagtggagggtagagttaactgaatgtctggtctgatcttagagcagcaggcaaaacaaatgtcaaaaaaaaagtgctttgaataagaacaaataagacttttaaatatcagtactcaaattgatagcagggtttgcagaatgtttgctttttttttttttgtccaaacgttgtgatttgaagtgacaaagtttgggtcctattctctttgaatgtttggcccttatatttatatttataaataagtgtaccactggatcatgataaataacaaagtttcaatgtagagtattagtttttgtcttccctttcgtcagtgaagaagacagaatcctgaatgttattttcttctgaaagttagaggagacatcaaaagttgaaatttagcaggcatatttttcagattttaattactagaaaaaatattatttttaggattcaatgactattattgactatgtaactaataaatgttattatggtacttttagattaaaagtctattccaaattgcattttgatttttcagatgttctaaattctagtgtgtaaatattataaaagtattgacattttgaagtgggtggagttccgtcgcctctctttggattagcttctaaaacttaatgaaatagaaagtaagtgtcttttcccactgaaaaaaaggttacattttattccttattgtacggagacccaaataaaatagacaaatcagaaataagagtgccagaattttttcttgccaatgtaacttcttagaattatgctgaattgcttttgctgtaaaaactggaccaactagtctattatggatattttgtagagaatttctgtacttttttttggctcagtgaggtcaagaattttaagttagaattaaagaactggaaggcatcctcttattcatttcgcaaatgaaagaactgaagtcctgagaagtcatgatttatccaggatcacacaattaatagtgaaggttggatgaaataagagcctcctggccatcagttcagtgatctttgtaaaagacccttcgggtttattttcaccatcactttacgtgcaatgtctgtaatttactgcattaggccagttagcacattataagtttgtgtttaatctgctaaaactaagggaacatctaggattaggaatactgacagtgacaaaaatcatggatggcaggaagcatattgaagaatctttagctagggtgggaaatgttccttcattagcttctgatcctgctgtctgggaggaacttctttgtttattgttctcaggacctgattctgccttctggaaggttcttccttgcccattttcctccaaggtcatatatatgtggacattggggaacatgccctttgtggagactatatagcctttgtttccttctttctgttcttgcaattcagggagcttgagcattgttttaagggtcaaacagtcaaaggcttataggtatcacttgtgggggttttggcaatgccattcctccaaaactgagatggcttttgacctatcttgtagttagtaacatgtgctagcattggagtgactgtgtggatcaggctggcaaggcagccttggctgaaatctcttgtcttggcacgttaagtaataatactctcttctactctcaaaactaccccagtttagacaacgtgtattatggtcactctagtcaataagcacaccaaaaattcccaagtctaatatatttctttgtttccttatttttattctcttctctctcaacttaccggagactcttgtatggccatcggaaaattaacctacttaacttgatttgcaacaaggctgagtccctctgtttgcctgagaaaatataatgggccagtttttttcagtcttcttttttaccatgtgaattccagaagcagtcagctcttataatcctaggagctccccaaatttctgaattttctatttccattcatttctgccctcaaatctgtcagtgcttgcctgtgcacatttcttatttataatctttgataagtgcaacaagtagtactttgttgttcctttttttttttttccaccctgtcgctcaggctggagtgcagtggcacaatcttggctcactgcaacctctgccttccgggttcaagtgattctcctgtctcagcctccccagtagctggaactacaggcacccgccaccacgcctggctaatttttgtatttttagtagagatggggtttcaccatattggccaggctagtctcgaactcctgactttgtgatccactcgcctcggcctcccaaagtgctgggattacagatgtgagcgactgcgcctagccgtactttgttattctaatattgttcatctcttttctccatagacatggacttggtagacacttgttctgcttttgaagttgtatcaggcatttttaaaaattgagctataacttacatacagtaaactcacagctcttgtgttgagttcagcgagttttgacaattatgtacatccgtgtaactactacccaaaatatgatatcagacattccattgcccaagatggatgtccatttctagttaattgcctactttaaacctctggaggcaaccactttttcacttcaatcaccaaagattagttttggcaagcagtatttttagtaagtgttttatgactgtgtgacataagtacctttctatccttttctcagtttcttcatctcctgctgtttggctgctaagcagtcaccatatgttttagtttttttaatgtcagcatccccctcaaaaataccatttttcttgtattagggaaagccagctattatgataaatgtacccaaattgtataacagcttaaatccagttaaagtgcatttattgctaatgaagcagtgcattgaaggcattcttgatcatttggtgaccttccataatgtgggccttggagtcctctagcagctggggaaagagcatgaacataccttacctgctgcttctgaggaaccttaacctggaagttggcattcagtcattctcactgacattctattggggagaactactcacaaggccacatgtgatacaaggttggaaaggcttggaaagggaaaattttgactgggcaaccacttcccagtgacagctcccacactgtgaaggggatagcaaattttggacaggttaatgcgataacttttattttgttttaataacataatactatattgcatctcttttttgtcttcatgttatttctttgtctttgtattatacattcttttatactttctggataaacattttcagtatttgaaactttaaaaaatagtattgttatctctgtagtagaaatgttcaaagcaaaagcaagtaatcttccccagattattcagtgaaattaaaattagttctgggcatcaacagatataatctaactcttaaaagacaaagctgcccagtatcaccatttctgttcaatattgtgtcagagatcctagccagcagagtaagtcagggtcgggggtgaggggtgggggacaactacaagaaaagatgtaggaatggaaaaggagaaaaacactgtcattattggcaaatgacttaattgtctatatagaaagctcctaggactcaacagctaaattcttaaaattagagagttgagcaaagtttttaaatgtaaagtcaatatagggaacccaattgcgtttctatagacgagcagcaacaacaaaacagaaaatttaaaaaccactttattttgaaataattaacatcctacatagccgtagtatatttatcaaaactaagaaattaacatttatatactaatattaactaaactacagcttttattttgatttttccagtttttctactgatactttcttttcattgcaggatctaacccaggataccacattgcattcaatagccatatctcttaaccaatttaaggcagtttcttgatcttttcttgtctttcagggatttgatacttttgaagaatagtggtcaagtcttttgtagaaaggatatcaatttgagtttggtgttttctcattattatatcacatcatgtcaggcagtaaatgttatcaatattgaaacccacccaattatcccatagatagttttttggataaacagaaattgaccattctggtcttaaagctggaaactttattttatctgagttcctttctcaggaaatgaccttcaggcctctcaaaataagtatcaaagaactgaatctcaccagatcaccacatccaaacaaggaaatgccgcacccctcattcatcatgattgcctccttgcctctctagagttcctattttctcacacatcgttacatttcttccctggtatgtaagcccctagttttagtcggtcagggagatggattttagactgagctcccatctcctcggctgcagcacctgattaaagccttcttccttggcaacattcatcgtctcagtcattggctttctgtgcagtgcaacatcaggacctagaccaaacctctggtgtttcagtaacaatatgacttgttactggtcatgttaaccttgatcagttggttaagatggtatctgcaagatttttccacagtaaagttactacagaaatgtaatttttaaaagatataatttacatagcaacatactacaaataacttttgtagaaatttaacaagttatgtctaagtcctttattgagaagttacaaacttttattgaaagacattaatggattagaagatttaatgttgcaaagatgttaattctctctcattacacatagaatcaaatccctaacagattttgagattgtatgattactattaatattattatttggatgatacttgacattgtaattctgaacttaaatggaagagcaatcatcccaaaatcacatacagattcctaaagaaggtgtttttcctcctatcaaggaagtgcttttgctgcctttatataatgacaatataaaaccatagtagttaagccagcatatggtatgaggatatacaaattggcagatgaaaataatagaaaatttacaaacagatccacctatatgtggaagcatgattcatgacacaacaggtgttgaagatcattgggggaaagggtgcgcgtaacagctttcagtatatggtgctgaggcaatagagtgtccatatgaaaaagatggaaagtggattcttacctcatcatacacaaaatgggaaaagttaaaatgttatgttagtaattatagtttaattataaaatctaaaattatgcatttagaagcagagctcgggaaagaaattgaagaagaaaatgaaactgtcaaatgaaaacaacattggaaggagtacaagagaaaaagatgatacaggaaaaacagtgaggtcatggaaattagacatgagagaggtgagcaaagtcaaatatacatttaaaagagtgacataacacctgagctttaaaatgtcagtgtttacaatatgacagaaacactgcatcacctattaactttgctcatcctgctgagttacatgccagaaatcataatgtgatctacagattatttaataatgtttctactgacaattcaattatgccatcatttgtagaaagcaaaggactggaaatcacttaacttggagggggatgtgctatcactttctcagtttggagaaatttatcaaaaaggcttaactaagacttatcaaatgagtgttacacttattattcttttacttaggggcaccctgtttaacctaacatacttagaaagggttgtttaaaatattattaattccattgtgtacttggcaatgtacaatttttagacaatggtttttctttttctttttttttttttgagacaaagtttctctcttgttgcccaggctggagtgcagtggcacaatcttggcacactgcaacttccacctctctggttcaagtgatcctcctgcctcagactcccaagtagctaggattataggcatcctccaccattcccagctaattttttgtatttttactagagaaggggtttcaccatgttgtccaggctggtcccaaactcctgacctcaggtgatctgcccgcctcagcctcccaaagtgctgggattacaggcgtgagccaccgcttctggctgacaatggtttttcttaatttatacctcaaatatatttttatcaaaaccttgaagctataaatgtagatcactcaatttagggaaaatggttgccatttaatctaattgacaaagctggtatttattttcaaacttatcttttaaatcagacatccttctgtcagtaaaagtcccacttgatttttcatctcaaataaatatgttaatatatgcctccatgacaaccatcacatggctgaattctaattctaatatagattaagtagataaggcacagagccttaccatgtgttgcctggatacaataaggtactgctgccttcagtgtttctttgctttgcgctcactgaaatctccagagagatacgtctttaacactaataagagtatagaagaggtaatccctgtaagtaaaatgtcctcactgtgtattgtggaactgcttcattctacaatacactcaatttatcatataataatatgggccaagtactccatttcttaataaaatctgtatgagacatggaaagaacaaggccttactatagtgctttgattaaaggaggtttcatagatagcattgttataatttttccccgtttttggaaccctggaggtttttacatcccaggaggtatgcatttcttttgtgaagtgagaagagaggccgcatgatgccttagctgccagtacactctcagaaagatcggtattgggaagaatgagagttgaggacctggaaatagattgccttaaaactatctaggcctacatatctcttaagaagcattagagcagcctcggatgttcctcagttttaagaccatgggtgtagatgacaggccaagtagatccatcatacgcataatcatagacccaacaaaaagtccaaacttaatgaaagaaaaccagtgtttagagcataaacttttctgaaataagtgacaacttgaatctaaacattgaaaggacactgtgtgcctgggtctggtaaagttgctggacctcagagataaaattttgggagggagccagaaaaataggtcaagatatttataaaggagaaaattatgttggcctcagatttcattcagtgcaagaaaataggccatacttaaaagacttttaagaaaaggataggtaacttacagatttttatatctgtccaaatagtccttcaactataagtcaataggcaaatagctttaaatttaaaataatataaaaatgatttatttgagactttattgaggcaacactggaggacagatcttttttacttgacgttgaaaggtaaagatgtacttgaacctgctaatcaaccacataaatacacttgtttgcatacaggttcaacttctttagcacaaagataaagcaataagttatcatgatacccatctccaaaggttagttcattgatgaagtaaatagaatcttgggcatggtgtttgcttgataccgtgaatgctgttaccaaaaatcttcccaagaaacattaactttgcctctttctaggtaaaacaaattaaatctgtaaaagatcttatatgcttgagttagaaaaaccctgaatatatttgggttggtgacaaaagtgaaatataacacccctgccactttgaacaaaactacattgattgtgaactgtagtaaaatatgtcatataatcctttttgagaagccatctgagaaagagtattatgtttttcttcagtggtaaagagttgcagtatctaaaccaagttttctactggctacactcggctatttctattcttgacctctatggttgacagcagcagatgagaaaaatgaagtctgtaataagtttgtctgtaagagagctgcagtgctctttataactgatcctgcagccagggtgcaggatacccaggtcatgatttgggttctttagttcgattgcccagaggataccaactcatattcccagggagatcaaactgccaagtaaaatgaggatggcgaagctgtatcaattttacttctctcaggagaagaaaaggatggtgtagctacctctcaagaagaggatacctatgaaagaaggaaaaattaatccagaaaaacttagggacatccagaaaataccagagccctttttagcccaagatcaaccattaaaaggaagacctcaaaggtatttcatttcctatgtacgttagtgtatctgataagtatttgaacaagttacctctacctgaatatgctgtgtctctttgtcttgctgtgacactttggataaggtctctgcagaaaatatagaaacaactgaccaaagagttgttaatgagaatacagctcttatctctcaccaatgactacatggaagaatttagagcctatttcaataacaatatgttgttcatccttcagtcagatggaaagagaccagaagcaggagagagagagtacatgcgggccaatgatgttagtaatgaagaaggagaggaagagaaagaaagagacagatgagatggaaaatggaaaagaaagtgttgaaaacagaggagcctcaaactcagtctgcccctaatactgatgaggcacagaaaaccaaggacatttctataaagttcatgaacacagatgaggaggctgaagatggcccagatgctgatttctttaaggagaaatagtactgtatgcttgggttggttggatctcgaagagaattcattgtaaaataaaaatttgtcagccgggcgcggtggctcacgcctttaaaaacaatacaaaaattagccgggcatggtggcgtgcgtctatagtactaggtactccagaggctgaggcaggagaatcgcttgaacctgggaggcagaggttgtggtgacccaagatcttgccactgcactccagcctgagcaacaaagcgagactctgtctctaaataaataaataaatataaaataaaaaattgtctgaatccagtgacaagaaaaaagtgaccaaaatcacacgcaaaagaaatgagaaattttaagtgaataagaacataattcttactgacgaagggaagtaggttcagcgctggccaccgatgcagaagtgcatcttaaaggatgctaaggaagaggattgtagtggtataaaccttgaaaaatcaaaagaaaggcttcaggaagtggaaaaatttgacaaagaagagtagaggaaaaaagttaagacaaagcatatggagaaaatacttcaaaggggaagcaaaaagagaggccagcaaggccaaagatgaagggaatgtcttttaggatctcagtggtaataatgggaaattcgattaattcactcttagatcctcgtacatacagatgtctgaagaatcagatagtgaagatacggaaaataaaattagtagttcaggaaaacccatagaaggaagaaaaggagccacagtaaagtggacaatgtgaaactactattataacaagttgcaaatgaaagaaggccaagtaggaatcctcagagtctctggatacagttctgtctctagcagaagacaaagagcttaaattttatctaagagcttaaactatatctgctcaaaatgaaagctaaatacttgctgctcttctcctctccttgaaacctgtgctcatgactgcgtgggtcagatgtcaaaaaagctttggagtagttaggtagcaaaagtcccatacctaaaagatcgatgcaactgcagactgaggtaatggtatgtctgacacctttcttccccatcagataatctacttaaaatgtgtgtggattataaaaattccccagcctgatttccagcatgtatattgttagactttagtccattcctttattttactgccaacttgtagaatctccattcatttttagaaattcttgtcttgtttaccatacagaatatagtatgtactatttaatattaaactttctcacgattttcatgtttttaatgtttccaaggagtgaaaatgcgatggaggcaccctgagaaatgagtatttttgaattgagatgatcattaatagaacctatttcctatttctaataaaagtagaacatttaggaataaattcaacaaaagacatgcaaaatctgtaagaacaacaaaactatactgagaaaaattaaagatagaaataaatgaagagagatgccatatggttggaaaactcaattaaatgacatttccctcaaaattgatctgtagattcaacataatccctagcataaatccacgggcctttttgtaaaattagcaagctaattctaaaagttacatagaaatgtaaaagactgagaaaatctgacgaatcttaaaaacataggtggaagacttgaatttgtaccataactataaagctgcagtaatccagatagcatggtgctgccataaggataaactaataaattaatgcaattgaacagaggccatagacccatttatatagtcctttgatttcaaacaaatccaaagcaaccaagtagggaaaggaaagtgttgcagtaaatggtgctgggtcaactagatatccacaagcaaaaatataaatctcaatttctgtcttgcatcatgcatataaatctatttgagatgaatcatactactaaatataaaaagctaaagccatacgaatttaagaaaacatcagagaatatccttatgacttgggggtaggcaaagatttcttaggatgtagaaagcaatcactgtaagagaaaagctttaaagaatagacttcattgaaaaaaccaaacttgtgtttatcaaaagataccactaagaaaacaaaaaacaagccacagactgagaaaaatatttgctaaatgtatatttgtcaaaggaatatatagctaatttatacagctccataacaaaaagcggaacaaccagaaactaaaaaggaatagggaacaaatgatttgaaaagacactttgtaacacagacactgcacaacggaagatattcaaatgattagtaagcatgtgatcagcgtcatttgtcatctgggaaatgcaggttaaaatgagaatgagaaacccaccatactgtctaaaatcagataggatctagagcaactggcattcttatacattaggtataccacttgaggaaaaagatctggcagtttcttatgaagttaaatacacttacccaatgattcagcagttctcctagatatttgcctaagagaaatgaaaataaaaatcgaccaaaaagattcttatgagaagtacatacataatatatgtgcataatatagcttcaatcatactagccagaaactggaatagcccagcttcccatcagtaagagaatggataaacagactgtggttattcataaaatgaaacactggcaaattatctgtgaggggaaaggatgagaaaagtcgttgcttctaggggatgggacgggaactgactgggaaggattttgaaggaacaaactttgggtagtggtaatgatttgggttacaaggtatatgcatttgtaaaaaaacttatggaatggtacacttaagattggtgcatttcattttatataaattttgcctcaagaaataaaaaagagctttaaaaatcacaaggaagtacttttttatgtccattagattggcaaaaatgttggagcatcctgaacttatcttgccctgctagtggttatacaaattgaatcaaccatataatacatttgcattaactaataagttgtgcatatatcaaccaagcaactccactctgaggcatagaaactcttggtaatctacatagagaaatacataatatgttccagaaagctgggaacaactcagatatccatcaataagagaagacacaaattgtgccacattcaaacatatcatcatggataagtctcatgaacagaataaaaccaagaaacttaagaatacttccaatatgattccaaccaatataactccatccaaaatcttgcaaaattaagcaagatattagggatacatatggtaacactataaaggaaagcaaaaacaacaacaacaaaaaaggatagctggagagaaggcatgggaaaaaggattggaattggaatgggaaaggccataaaggggacttcaaagttataagtaatgtattctctaaactggctagtgggaaaacaggtgttcattttactatttataacttgcacatttgttgaaaatactatttggtatgtattcagcatttaatttcttgagaaattagaggtacacttaaataatctttaaggatacttcttagcaataatacgatatgcaaaatatgagaagtaggctttctgctgtcactaattcagtcattcaagtgtttatcaaatgcctatacagcttgatatggatgtgacattagtggccttatttggaggccacagttttggtggctgtatcttaaaagcgaattagaagaactactgaaatctaaaatgattgggatttatattggtacagtataaatcttctgagactgtttctcagaagttccgccattattgcttcaagaagggaaagaaaattatggattttcacttatgtgatgggtaaatgaaaccatcagaaaagacagaagtaatttttttggcctttggaatgaatctcctccaacagaattcttttaaaataggatgggccagataactgagagggcccggctttgacctctttccactaatgctggttcagctgacttctcaaagcacacttttatgagttgaactgattattgacccatcaatgaatttaccttaaaaccaggtcatggagaatgactcccataatatattttcttgcaacttcactgtgataaaaattctcaggatgctgtggctaatatctagatcttaatgttatgttgaatcctaaacattttcaagatatttatagattttttcatctctgcacttcctgaaaaatctgtgaatatttttcattaaattaacttgccgagaaaattaaggttggacactgtggcttcctatatagtcctacatttgtagctttaaatgttaagggcttaccccaaccctttactctttataagtattcaaacattcctttggataacaaataataaattcatagtgctagatatccagcaagatgacagtctggttgcttatatgaagtacctaaatatacacaattgcaattccaaagccttattgcttcatttatcacaggaagtgccagagttctgcaatatcttgtaagaaaagctactcgacttgcatgaattctcataggaatgaccatgaatattatgccaatttcatcctaagtattgaagttaaggttctaaatgacatttaatagtatgatttattttctatcttaaacttcatagggcacaaagcaagatcctatcctttcatattgcttttttatttttaaagagtctgactgatgataaaaatctaagcttaaaaactgtcaaatgatttatgatatttcatttatttttcaaaggattggggtgtcaccagtaagcctattagaattgtaggtttaaagttccttgattttaaaaaagaccagctgcctaaacaagttttgagctttgtaatttaattctatgtgattttttttaatacttcaaagtaccaaagtaggcatttcttcttaggtcataaatagttgtttatgtcattatgatttcaaactttcaagtacattttaagatctactttttaaaaatattgatttttttttattgtgttcattacaacctcaagacatttctttctgtctacctaaatctccctttcttcatgggctgacagcaacaaaggtagaacatgaagaaactggaggaagcctccttttaaaaaattggaattctgtagtcgagtatatataatccagtgtctttgagaaatgctgtgaaaccactttaaagctgttttttaatgacacttttaagtttgggataattgtaaatttgcatgcagttacaagagataatatatgttccatgcaccgcttacacaatccccccagtggtaacatccaggatattaacactgatgcattctagatcttattcagattttcctagtttttctcgaactcatttgtgtgtgtatttatttagttctatctaatttttatcacatgtgtagcttcttgtatctactacagtcaagatgaacatttccatcacaaagattccatcatgttggccttttataatcacactcatctaccttcccacttcccacccctgtccctaacccctggcaaccactaatctgccccctgttgccataatttttccattttaaaaatgttatttaaatggatccttagatttaacttttttgatttaacttttttaatttaactttttcattctcttgagattgtctcgagattaatattatttccttgagattcatccaacttgtgtttattaataacttgttcatttcgattactaagtggtattccattaaaatcaattttgatttttagtttatacgcacacataaaatgtgaagcaataatgcaaaatatcagtttaaaacgtgtttaggacattgttgaaattaacctattaaaattacatattttttgtcattttagtcatttggattggatttgtctatggcttaatatgctaagactggatgaatcatcacctgtataccgaacatatagttccagtgggaacattctattccctaactcattttaataaaaactgtgaggttggagatacaagagaagttccttgttcttattccagaagatttgctatttagttttttctttccttttacagcctgtgattacccacgtaattctcttcatataacctattgttacctaagtaattcttcttccccttgtgcctgtgcttgcttttccaactaaatgattaagtgtcttaatttctaggctgactaagatacttctttcctccttcctccctaaattcacttactctttctctaacctgaaagaaaggggtaagatgatgagtaccaagaataaaagtatttggcttcatctgggaggccagagaaggcttccctaaggaggatacatttaagcaaaaatctgatggatgaataagagtcaactaggagaagaggaggaagaaatagcattttaaacagagaaaagaaagggcatgggcaaagaccctgtggtgggaaggagcaaagcaagcaggaagaattggaatcaagccaagtggagaatgggctgagagaaccaagggaatatatggtatgaaattggactggagagggaggcagagttcagaccttatagagctttttaggtcatatttaataaagatcagtgcttattctaagaccaatgagaaacaaataaagggttttaagcatgaagttgacttgtccagatttgcaatctgtaaagatccttttggctgcagcgtggatggtgctttggggtaaagggtggaagtgtctcgactggttacaggccattttagtggggtacactggagaggatggaccttggggtaaagttatagtggtgcagttatagaaaagataacagatttaatccttaaatcccaacagatatgttgtattagaaatgggagaggaaagagaactgtattaaaaataactactagatttctgattacagcatttagacagcgagggaattccagcagcagatcacattttgggaacatcatgcatttcaaaggcagaacatttcagatggctttgagacacacaagaggaaaggtcaaatagtaataatgataatagccaatatttttgagcatttacagttattacagcattttttaagctgaggacatggaaacacagaaatgttaagagacttgtccaatgtcagacagtaagtggaagaaacaggatttaaatctacgtagttcacctccagagcccatgcaccttatcattctgtatgctgcctgtgtagacagatatggacctacagatatgtaggtgtggagctcatagaaggggtctggactagagattaaaagtacagaacaaaaaagttcatttttatttacatctctgtgaaatggatgagatatcctagggagagaatataaagtgagacatgatgtttaccttgaggctcttcagcattcagtggccaaggatggcaagataggcagaaggaaagacgagggacttctggttgatataaaagaagagaaaggggatgttaaggagataatgaacaatggtggttttactgctaacatgtccagtaagatgaagactgaatggtgtctgtggacaactttgacagaagggtcttggaggagtggtgtagtggggctcaagcacatatgaggagtgaataggagatgaggacatgaagtcagaacatttaggcaactctgtagagaagtttatttgaagcaggaagtgtctagataggcctgtgagctatagctggagggagatgtggggccaaatggttttgttttgctgttattttaaaggaagagactagggtttgtttaaaaaccagtgcaaaaagatctgcgtaagaagaagaggttgaatatataaacaagagaaggaataatattttcatgttgttgggaaaatgggagagaatgggattaggcataggcagagggtctggcatttggaaggaggaggggcaccactttggtgtgtcaagtccagagtaggaaggactggagccactttggtaggttgtatgtgataccaggaaggagagtgactttccatcagataacttctgtttcctttggaaaatgaaggtgaaatgatctagagagagcatgaagaggagaatagtactgaaggtttgaggagttaaggagagcaggtttagtgtcaggcatcaaagaggctggctcttgtgtttccaaaaataatctgggcagtgagtttcctagttgaccacaaacatcgttttctgagcagttgcagagtttgaggagatgagaatttgtaggacacagagacttaggctgttctaaatgtggtttttgtattgtatgtgtccatttctcctgagaagtgaggtcagtattaaagctgagaaggagacgggaggcatgagatgttctgtggaaatttttaaacacatttttttaaagcaaacatctgtagtgatttaaattattttattgaaagcgtcttctgacacatcacatgttatcttacattttacttattttagagaacagtttattcaccagcaaggctcttcaactggctttttaaagacagggcccctatctcactaagcaagctgctgagtgtgtcccacaggtattcactaaataaatggtgagagaagtgctagatattgcaactctgctggtactgtggctacattttatttggccaagggatttttttgctttatatttttttgtaaaccttactaaatagatgttctcatttgaaattataatgatctccatttttttaatgtgccaagagagtgattttcccttacccaattaaaagtttgattcatttaatgtaactgagaagtgtgaatcataaacgaaacattatatgtatttatttttcatatgttttaagttatgaaaatgtatttgcttgaactaccatattctaagattttgatacattttgtagtgactcttctggatgttttctattccagaaaatatgaaattttagtttcgatttttcataaaaagatatattgaatatgatagctttaattttaactgtattaatttagattggcctaggaaccacagaatgcttacacaaaaattctaaagaacatactaagaaatagtttatttttaccataggtaaaaagatgatgagtttctctaaatataggcggctttttttttttttttttttggccaatatacaaataaagattcgtctaaagcagtggttctttaaaggggtgctatatcaatactaacatataaagttgctttctgcccctttgcaagattgtgtctccgttcttcatgctaccatgcccctgctgagactctcttcatactgaccagattgttttctgcttcagtcaggttttgaagtgttcgcattttttttctactgtatctttgcctccttgtccatctatggctataggaagctcatcctgggagtggaggaacagatgttctgtcattgccacattcttctggacacagactggagaactataggaatgtaagcatttgctgaaacatagtactcttttctgtttctaagcacctattcattattgctgtcattgacccttatgttctccatctttcccagggttccttgcttccttcaatctatgatcactttaagtatggtctttcctcttcccttcacctatagtctcaggtgaatcttcttccccctttaccaagtacacaaggtaattgtactctaacaccctaggaaaacctgaagtctttgtgcagccagcctgtcctggacaagggcagagagcttcaggagcttgcttttcaagaagtgcccagttgaacctagggagcttcagtcctcaagaacaaatgtgaaagaagatctagctagacaaactgtgaaaagaatatatttacctgccatgacctttacgttggttatgaggatagctcagaagtctctttgcatcactctatgtaccctacttgtgtggatattttgtgatatggtcttcaaaactggaacaaggcatggcataccagcttgaaagaatatttttagattcaggctccatggtggttaccatatgactgcttaaggcacagctgcttctaaaacacctttgccatacttaactttttctgatttaattagatcatatagttagtgtcattaatttgggatggaagcacccttctgtcatgactactgtccctcacaagtttgaaaatgattcaccatgcagtattaaaaagtaaaatgcttttattactttcatcaagaggccatatgatacaaaggttcaggataaagatgaaaaagtgagtaggaaaagaaaattaaagttaaaaagttatttcctgagatttattatttctggcactatttttggattttgggttctatattttagaaggtaaaatctcagtcgagaatcaggagttctgtgttttattcagttagaaagttttgatgtatttggaaagtcatgtaattttcctattgtccaagtaaaaatggccatgattccatagtagaagcttatggagaatatgtgtgaaggtgctgaatgatgattacataataatcagaaacaaaagttaagcatttctttggttttgtaacttcatataattcaagagatagtatttaagtcatattcatgtatatatttaaaaaaatcttagtactttactaaagtggtaaactttcatattacacagtttgataaggcaaatatctttatgacttttgtgtaagatcctaaatactgttattttttcaaaaaatatagatgtggccttaatgatatgctaataatactgttttgtagttttctcttaaaagtttgtaaatccagttttctttttttaggtatgttgaagaaagtacgcacatcttatcttctgaacattttgatggaattaaccacaaacttcatgcaagaacagtaaaaggtattttgttaaataatttttgcatattgatgtagtgctcttaatttctagatttgcttcacaaaggcctaccttaaatcaactgcaaatggatactacttcacagagtagattttgtaagagaagtttcttaatcataaaatatatttcttctttaccaagtcatatgatatttctttcagaaagcgcttgtacagactaaatttcagtattagtagtttgaaataacatcatttattttcactgtgcacttgtatatatttttatatgcagcgtacattgtagtcatgtatttaaaacatgcccatgagatagatatgaaattaatcaggaaagataggacagctgcattcatttcctaccttgctctccttggagttcttcagaatagatgtgtttaagagcaaatccaaagcaagcaccttactgtgcatacctcctaccattaggatgatattaaatggcatggtgagcccttaaaaaggtaagcaccctcttgaaaacaccagaatagcttgagctccattcccagatccaacattataagccacatacacctaacagacatctgtagaatactccacttaaagaacagaacacacattcaagtgcatatggaacactcttcaggatagattattaggacataaaattagcctcaatacatgtaaaaaggattgaaatgatactaaagtatgttctctgaccactatagaatacaattaggaataagtaacaaaaggaaatttgggaaatgcacaaatatgtagaaattaaatgatatactcctaatttgggaaatgcacagatatgtggaaattaaataatatacttctaaataatcagagtcaaagaggaaatcacaagggaaattagaaaatatcttgagataaattaacctaaagcactacataccaaaatttatgggctgcaactttaaaaagcagtgtttagagagaaatttatagctataaatccttattgttttcaaaaaaagaaagatctcaaattgataacccaacttttcaccttaagaacctagaaaaagaagagcaaactaaacctaaacaagcagaaggaagaaaataataaagatgaaagtgcaaatgaatgaaataaagaataaaaacaatagagaaaatcaataaaagcaaaagttggttctttgaaagatcagcaaaattaatgaacctttggctagactaaccaggataaaagaataatcaacaaagaaagaggggatatcactactgactctacagaaatttaaaaaaggtaattatatgtcaaaatatttggtgacttagatgaaatggataaattcctaaaaaacaaaaactaccaaaacggagtcaagaagacagagaaaatatgaacctataacaagttaagtgattgaattataattttaaaaatttcccccttcacacacacaaaacccaggcccatatgtcctcactgtgaattctaccaaaaatttagaaaagaattaataccaatcctttacaaacttctccaaaaaatacaagaggagagaatacttcctgactgattctgtgaggccagtgtattaccatgataaaaatggacaagacaacaacaacacaagaaaactatagaccagtatctttggtctatagttctgatgtaaaaattcttgccaggtgtggtggctcacagttgtaatcccagcactttgggaggctaaggcaggtgggtcacctgagttgaggagtttgaggccagcctagccaccatggtgaaaccgcgtctctactaaaaatacaaaaattagctgggcgtggtggcgaatgcctgtgatcccagctactctggaggctgaggcaggtgaatagcttgaacccaggagacggaggttgcagtgagccaaaattacaccattgcactccagcctgggcgacaagagcaagactatgtcttaaactaacaaagaaaaattctcaacaaaatactggaaaattaaatctagtgacatatgaaaagcatagaaaccaagaccaaatgggatatatgtaaggaatgcaagattggtttgacatatgaaaaatcagtgttgacaccacattaatagaatagagaacagaagtcacatgataatagacacagaaaaagcacttgacaaaatctaagtcccttttatcatacaaacactgaacaaactaggaatagaagtgaacttcctcaccctgataaagagaatctacaaaaactacacagctaacatcatacttaatggtgaaaaactgaaagtgtgccctctaagatcaggaacaagacaaggatgagttatcttactgtttctatttaactttgtactggaggttctaagcaggacagttaggtaagaaaaagaaaagcatccagattggaaagccagaagaaaaacgttctctatttgtagatgacatcttgtatgtaaaaaaatcttaaggaatccactaaaaaattcttagaactaattaatgaattcagcaaggttgaaagatacaagatcaatataaagatcaattgtatttatatacactaccaaggaacaatctggaaattgagaaataaaactgagaaattaagaaaacaatgacgttggcagtagcattaaacagaatacgcaggaataaatatttacaaataagcaaaagaagtgcaagacttgcacaccaaaaactacaaaatattgttgtgaaaaattaaatacctaaataagtggaaagacatctgtgtctttgaattagaaaactcacattgttaagatagtaatacaccccaaattgttctagtttcaatgcagtctctatgaaaatttcagctgccccttttgtagaaattgacaagctgaccctaaaattaatatggaaatacaaggaatccataatagccaaaatagtattgaaaaagaaaagcaaagtttgaaaactccccattctcaatttcaagacttactacaaagctataataaataacagtgtggtagtggcgtaaggatagacatacagatcaatggaatagaattaagggtctaaaaataaactgttacatctatggtacactgataatcaacaagggtaccaagaattatccaatagtcttttcagccagtagtcttgggacaagtggatatcctcacacaatatataaaaattaattcaaaatggatcaaagacctaaatgtaagagataaaaacaatatgaaactcttagaggaaaacatagactgaaatctttataaccttgtgataggcagtggtttcttagattgataccaaaagtataaacaacaaaagaaaactatgtaagatggactacactaaaattaaaaacttttgtacttcaaaggataccatcaagaaagtgaaaagacagcccacaaaatgggagaaaatatttgcaaatcttatatctgataaagaacctgcatccaacatatataaagaactgttacaactcaacaataaaaataacccaattaaaactggtcaaagaaattgaatagacatttttccgaagaagatctgcaaattgccaatgagcacatgaaaagatgtgcaacgtcgttagtcattagggaatagccacaatgaaacactgcttcatgcctcgtgggatggctataatttaaatatggacaaaaacaagtattagtgaggatttgttgacattggaaaccctatacattactggtggggatgtaaatggaaaatttgttcggaaaacaatctggaaaatcctcaaaaggttaaacatagagttactctaagacacagccagtatttatattgtaaacctcttcccttcctatgtgtaacactgtaaaggggtaaatgttacagtatgtgaagtatatcacaaatagctcctcctagatggtctgttactgtgccaaattcttagggtaccatatgaacacaaaggggtgtgaaccctaccctctagagcttcttgtctgttaggagtatgaggcattacaattgtggtaagtaccatcagggaaagatacaggggccactaagattattaacagggatatctgaacctaggtcagggacagttctcttaaggaggtgattttcctttgcgatccaaaggatgaatccgagttatctaggcaaaaagggcataagataagagggattacaggaaatggggggccaacaggtgtaaagactctgttgagagagtcatggggtgttcaggaaatggaaggaaggtcagtgtgaatgagacaaagaaagtgagggggtgaggagtgcagggtgcgtccgagaagaaggtccagaccagagtgtggacaacctcatcaatgtgttatggctttgaaaggttttcagtctggggtgacacattctaatttgtcttttgaaaacatcactctggctgtgtcagttagaaaaggggcagaagtggaagtgggagggaacagtgaagagtactcatggtctaggcagggactgatagagcaacttgcaccagacagttggcagtggagacgaggaaaaggggacatatctgaaggctttttgcaagataaaattgatactatttggtggaagccaagataggggaggtaagggagagaggtgtaaggcatggctcccagacactggactttggaaagtgaatgagttggagggctgtttctaagccagagattttccttcatgataaactttgttatgaacaacttcaagtaacatgaatggattttgttctgttgataagtatctctttcttaccaaggcagtcacatataatacagaattatgtgatttgctgatagcaaatatttggggagagtacaaattttggaaaattagacaatgttttttatttgccagatgaattttgctctgagagtctctgttgttctagtctgtctcctgtgtcttttttttttttttaactgtggcatgaattgttttcaatttgttgtgctgttactaaagttctgagggctgcagttaaaacattccaatttctcctttccatctttattgattctcaagattttgcaacagaaaactctttgggggctagaacagcagtaattgcatcacactgttttcaagaattcaagtttcaaaagcaaatcattaaaaaacaaaaatacagttcctgatttgagttagatacagggacaaaaaagtagcacatacttgaaggttacatggtctacaaatgttggctatattttccttgggagagtagttctgttggtatatattttttaaatactcaaaaggctcaacctcaagcagtaataaacacaagcaaaagtcccgtgtcttcttataatgtgtttggccttgctgatcctcccccagtgctgtagagatcatctgtcatgtgagcgtcctcatttttaggtaagtaatgaaagtagactctgaaataattttctggcaagtaactcccttccaatgagaaatatctggactgaatgtagttttagaaatttcttatttccttggccagccaaagtcttaaaatgccaagttctttggggatgcttttattctccagttatgtagaagtgatggtgttttcttataacttctaaaagctgagaggtgacagtgtgctggcagccctcactcgctctcggtgcctcctcggccttggcatccattctggccgtgcttgaggagtccttcagcccgccgctgcaccgtgggagcccttctctgggctggctgagtccggagccggctcccttggcttgcggggaggtgtggagggagaggcacgggcagaaccggggctgcatgcagcgcttgtgggccagctagagttccgggtgggcgtgggcttggcgggccccgcactgggagcggctggctggccggccctgccagcccaggcagtgaggggattaggacctgggccagcagctgcggagggtgcatccggtcccccagcagtgcggcgctgcgctcgatttctccccggtccttagctgcctccccgcagggaaggcctacctgcagcccgacatgcctgagtctccccgctctgccatgggctcctgcaccacctgagcctccccaaggagcaccacccgctgctgcacggcgcctggtcccatctaccacccaagggctgaggagtgcgggcacactgcgggactggcaggcagctccacctgcggcccggtgggagatccactgggtgaggccagctgggctcctgagtctagtgaggacttggaaaacttttgtgtctagctaagggattgtgagtgcaccagtcagcactctgtgtctagctcaaggtttgtaaatgcaccaatcagcgctctgtgtctagctaatctggtgggtacttggagaatctttatgtctagctaagggattgtgaatgcaccaatcggcactctatgtctagctcaaagtttgtaaatgcaccagtcagtgctctgtgtctagctaatctggtggggacttggagaatctttatgtctagttaagggattgtgaatgcaccaattggcactctgtatctagctcaaggtttgtaaatgcatgaatcagcactctgtctagctcaagttttgtaaatacaccaatcgacactctgtatctaggtaatctagtggggacgtggagaatttttgtgtctagctcagggattgtaaacacaccaatcagcaccctgtcaaaatggaccaatcagctctctgtgaaacagaccaatcagctctctgtaaaatggaccaatcagcaggatttaggtggggccagataagagaataaaagcaggctgccagtcccagccatggcaaccctctcaggtagtcttccacactgtggaagctttgttctttcgctctatgcaataaatcttgctgctgcccactctttgggtccacactgcctttatgagctgtaacactcactgcgaaggtctgcagcttcactcctaaagccagccagatcacgaacccaccaggagaaactaacaactccagacgcgccaccttaagagctgtaacactcacagcgaaagtctgtagcttcactcctgagccagcaagatcatgaacccaccagaaagaagaaactctgaacacatctgaacatcagaaggaacaaactccagacacaccgcctttaagaactgtaacactcaccgtgagggtccgcggcttcattcttgaagtcagtgagaccaagaacccaccaattgcggacacattttggcgaccacgaagggaccatcgcctatcgccaagcggtgagactatcgccgagcggtgagaccatcgcctattgccaagcgacgagacaattgcctatcgccaagcagtgagtaccatcagaccccttttggttgctattctgtcctatttttccttagaattcgggggccaaataccgggcacctgtcggccagttaaaagtgactagcatggcccccggactaaagacagaggtgtcaggctttctgggaaagggctagctaacaacccccgactcagcggaacatcagaaggaacaaactccggacgtgccgcctttaagaactgtaacactcagcgcgagggtccgcggcttcattcttgaagtcagtgagaccaagaacccaccaattccggacacaaagccacattggcaacttaatgctacactgaaataaattttaatttataccctaaaatcgttttcatatgatccctgaagagttccacttgcatttaggatgccagcacacagaaccaactgaccgctaaagatctcatgggaaagagtgtgcaaatgggttgtgatttcagttataactgttataagaaaggcgacttcctgattattagtgtttattgctaatgtatcagtaatgggcaaatactataaatctgcaaataccaaacagcaaagctagaggcaaatttgtattaggagaatcaggacagtcatttagagaaaatcatagtgaactgccttttgcatttttctcctggggtatttttactaacatttgttctcctgaaccagcacacacaggaaggaatcagggattactgttcctaatttttcactgagaatactgatgcttgcatctatttgaatcaagtttccatttttcttactgcagtataggccatttaaaaattagctttttattattgatgagcattaactatcattatttttcatgtgtacttaccttctgttgtgcattttaatttctgaggatactgagggcagaacccagtacgtgtcttcaaacctcagctccacattttactagctgggtgagcgtaaataagttacttaatctctctctgcctgaatttccttgtatgtaaaatggggatcataaaatatccatcccaaggctgtgatgagaattaaagaaattagcgtatacttaatgcttagaacactgtttggagccatagtaatctcaaaataaatgttagttgctgctgctgttgtaccaataaaatagctctctaactcccacctgctaattaagaggttaattcagttatggttattggtggtggtggttttctttgttatttgggctattttggtggagtgaggtcaagtttacatagctagtaagtggtataaaccaggtttactaagtcactggtttagagtagggattagcaaaccaaattgggcctggttttgtgtggcctgcaagctaagaatgatttttatatttctaaattgttgaaaaaaaacaaaggatgatattttgtgatcaatgaaaatgatataaaattttgtttcagtatccatacatagtttttattggaactttgtaaataatcttatatattgcttgtagctgttttcttactacactagtagaatagagtagttatgacacagatggtagggtccacaaaactgaaaatatttaccatgtaaccctttacagaaaaagttttccagcacctgctttgtggagttatcagttatgtcgattagagtgaatgcctactttttatactgccctactttgacaaaagattgttgcataagaaagtatataattttaattagctatccttgtggccagaaaactttggtttgttttgttttgttttcaaaaggataattttctacgttggttaaaattttcttgaaactcacatacaagttcaggagtagagttaattaaactctagtagattgtgtaagtatatacatgccaaaaactatacatattcactagagtattaagatttggattagtctaagagttgtcaaaacaaaagtctgactctgtgtgccctgtgtgtgggggggtggggaggaggttcagtacgtttgctattctgtatttcttttttaaaagattattgaaatataatgaattctgaaacagcctgttaataaggtgaatttttcaatgataatgtaccttaagagtatagtattataatcccattttggaagttacttgtggttatttctttaaagcctttgtttttgtgactgaaagcctgatacttataaggtggccaaactctggaggcttttagcagttgtacttggagagcatgtgctttaattttgtcacacgaatcatttaggcaaataaccttttcttctgtctatgtgctgtttctaagtatgatgtggatctttcttatttggttagttatataatctttatttagcatcttctttccccttgaatatctacaaaatcttgtaactccttttttttaaagtttataccattcaaagttaactcatcaaatatttttgaaagactttgtccaaggtcctgaagctaagaatgtgacagacttgcaccctgcccctgtagagttttgagtctggtgaggaagatagatgtgaagttaatgtaagtttggtcagtgttgggaaaggagaattaaattgtgcaaagaaaagatagaataacgggaccttaactaatctgaagaaggtggagaatattctttggatttttaaaaaaatttgtgatgattttgaagatccatccttaactaaagatctgttactaagttgaaattattttgagtttagaaaaagtattgagtgagaattataggaaattacgtatggtgtccctcttattgatacaggtgcaatctactaaattgctatactggatgatggatgattgatggatggactttacacatttgattttgccaggaaattatatattgagtgtaatggtcaccatgaaattggaatgcggaaaataccaaaagtgaaaaaaagactacttgaaaatcaaaatatctgttcttaaacagaaatatatttttaaagtggaatctaactaagcgttcccccccttttagaacggttattatttttagtataaaaatagatggttatgtagttatgtatgtattatataaatatatacaatatagttatatatgtgtgtgtatatgcacacacatacatgtattatacccaattaaaggtggaagtgccaccaagtcaagccccaaaagtaaccactgttgataatttgatgtttctctgtgagaatacaactttttttcctttaagggcaaaggagatcagaatatacctactgttccacagcttgcttcacttaagatgatgttatggacatctttccctggcagtgttgattgagaaccacctctctccctagatctactttattcttgttgttctcattgttgatactgctgttttaagttgtattctgtaaggtagaacattcaaaaggttacaaaaaagtatacatagaaagtcatttttctttccaattcttccttttccagaggctaccacccttagcaatttcttacctcttgaaatcatccagttactattatatgcctttacttagactaaagttaaccccccaaactaatcattcatgaggaaaccaaatgcttagtgaatttacagcagcaaccaattgattttgtaatattatatttaatatagtatttaattgtatttaagattgtataccaaaatggtaacagatttcccatttgttgtatttcagtttcaagtttaatgctgtgtgattgttgttagaggatgcagtctggaggtgaacaatctctgtcagcggtttagatctttcaagtaactgtttcaggagcaaccccacaaggccctgtgtgccccagagcactgcccccacatgtcctcaccactgtctgcttgtctcactgtcagtgttgtgagtacagacccaggtcttgaagatcccaggaggaaatgaccttgctgctttaatctgaaagttaatttaggggtttacagctcatctctgtgatgtcatattttcatctgatgattgtaatctggaaccactgggttaacctgctgttttcaggccagctttgttaatgccagagcctggggagtggaggtggctgggtggtgatagatttaagggaggtcaggaatctcctctgctgggaccaatctggagctgagaagatgttatttgttgaagcacttgctctatagcactggatcttttgtcagctgctaatactaagatggccttctgaacaagattacctgaaactccctgcctttctaataaactcaccagagaacatggggtgatagtattggggggaatatagaaagaagttaaccagatccaatcttcagagtggctgtgttgatatcctatggcctgaagagccctaggctagtacttccctttttataggcagtatttacttttgtataaaatatgttcctcaaaaaactacccagatatacagtgtgtaaaagtaaaacaaacaaaaagacatatgctaagaagatattcctttaccagagtactagtaaaacattatacaattcaaaaagaatatgtcattctttctgacatagatgtatgtctagtatgaatattgtatactttgtaaatattctttagttttatcatttttctttacagttgagcacatgcctggcttaagtcaagtatgcttccagtaaaagttaaaagacttgccacataaaacaccctgagtgattgccatttttgcctaaacttaatattgtttacaaggcctatgcttcatgtcagtactatgatcacatttactttttttattgtggtaaaaaacacataacttaaaatttaccttcttaaccctttttaagtgtacatttcagtagtgttaattacattcacattgtcgtgcagccaaactctagaatttttcatcttgtaaaactggaaccgtatacccatcaaacaactcccaatttctccctggtttcttctcttccggcctcccctcctccccacaaccccatatcccccagaaaccactattctgctgtctatctttgaatttaattactctagatacctgatatatatggaatcatacaatgtttgcccttttctgacgggcttatttcatttaacatagtctcctcaaggttcattcatattatagcatgtgtcagaatttcctttctttttaaagttgaataatccattgtatgtatatatcacattttgttgatccatctatctgtcaatgggcagttgagttgtttcacttcttggctactatgaaaaatgctgctatgaacatggatgtgcatatatctctttgagatcttgctttcagttttttgttttttttttttttttttttgagatggagtctcactcagttgcccaggctggagtgccgtggcgcggtctcggctcactgcaagctctgcctcccaggttcatgccgttctcctgcctcagcctcccaagtatctgggactacaggtgcccgtcactatgcccagctaatttttttgtatttttagtagagatggggtttcaccgtgttagccaggatggtcttgatctgacatgatctgcccctctcggcctcccaaagtactgggattacaggcgtgaggcaccgtgcctggcctcagttctttttgacattcacacagatgtggaattgctagaccatatggtaattctatttttaattttttgaggtactgctatacagtattccatagttgctgcaccattttacatttccaatggtaaataagagtttcaattcctccatatcctcaccaacatttgttattttctcagttttgttttttaaatagtagccatcctaatgagtgtgaggtgttatttcattgtggttttgatttgcatttttctaattagtgatcatcttttaatatgcttgttggccatttgtacatcatctttagagaaatgtctatacaaatgcttcgctctgtttaagttgggttatttgggttttgttgagtcataggagttctttatatattctggatattaatcccttatcagataattatttgcaaatattttctttcattctataagttgccttttcactctgttgattgtatctgttgatacatggaagttttaaattttggtatagtccagtttatctatttttacctttgctgcctatgtttttggtgtcatctcagtcacatttactttccatcttttcatctccaaacacccaaactaatttttctaaagaacaaaatgtaatgaaatatttaaataattataaaataactactgcaagacaaagatgactactcctgaaagtgaactcttggctagcaccatcatgccctaactcgaagtgttgcttcatccactaatgtgaaaatgtacacatttggagtacaaaatgcagttggaggagtggatctagaaatagattgtggggacatgggcaaatataggaaaacaaaggaagaggaaagcacacctagttgtatccttttaattaggatccttgagtatccacaagtaaactatttaacaaatccttgcaagaaaaaaatggtcctctagggccttctgcgttctgatttttctcatctttcctatgtgttaatgcctcatagtctgctaacacctctaaacagagacgagttagaaatttttgttgtaaggttaactttcaaatttagagaaataaagatgctcttcaaatatttaactttatcccaacctaaattttaataaactattgaagttgactagcaacatggccatttataccaattagtagttatagactatcaagactgtcagccgtgcacacaaaagtactataagcatcttttctaactgcaagagtgtatgaaccagtgcttgaatggttttctgagatatttaaagaaactggaatttaagtgattttttttcttcaaatgctctttctccttgtataataatgttgccattgttccttttttcttcctactttttctttcttttgtgattgctacttactcatctttctcttgatcgttagttctacacagatgttgatagttctccttgcctaatttttcttccccacccacccagactcattattcactgtcctcagccctgatcgctgtcctccagcatttacaaggattaaaatgagcctgccagagtctgtgtggctatgattctcgtttcagggcactagaggacacacacattaatacttcccaggtgctgggtcagcggcttcctctcccacctggtgctcaggccaggtgttggtaagacggtaggaacctgaactggcaggaaattattaagcctagatgttgcctctggactgtctagtcctccaaacacccgaagcagtttgattcttaaaaacttactcagaaaaagaagctactgagatattttccctttttattttcttttgggtttaaataaatagtaatggttattctacccatgtgaagtttttacttcttaaataaacccctgtaacaagtagagcatcttctgcaaagagagtccatggatgcttattaatacattaaatgttccagttaagctctaggttaatgaaaattcaagtttttgagtggttactttgttctagtcctctgatgtaccattttgctgtgtgcaacagtacagtattatttgagtggttttattcattaacaaaatgtaccaaaataaatttagctagggtcacagtgtttaatttaatagtattacaataataactaccataattagtttcagatttgccttccttcccagaggataagacttttttagttttgaatgcgttctgaaggtatgataatgacagcaaaattaatgtcatgacctttatagcctgtttatagtttttccatgttgtaccctaaaggatttagggagcagtgtacatctaaaataaaccacttagtatggacaagttaaaaattgggttaattgggttcacatatcctcagctggtagcacctcagtcaagacaccatttcatcttacataaaggagcatgatttttacactataaaatcatcttaaaactgtacctgtaatgttttaaaaagaaaaacattttaaaaggctactttttcaaatatgtaacaatgttttctctaattatgttatgtggtttgactttttcaattaggaaatcaagttgttttcatagcaagaaaatgttgatacaaactaatgtgtcatgctgcatgaacactaatgctcacttccttttggtgatgttgggcagcagcactgtctcttgcaacggactccttttcccatttgtagtttgttggtgggacttcccataaacaatcacccttctaagtcctggagatgggaaacttggttttcattgtttatatatttcagtaaaatacagtgtttgcatattcagctaaagttgagacaattacataggcatgttagaatccttaaacgttttgagtatttgattgaaaaattcctatggcaatttttgcaagtgatggttttgaggcactttcatgcgttgttagataaatcagtgcaacttctttgaaggacagtttggcaaaatctagaaaaatattaagtcaacccagaaatttcttactgtgacttcctgcagatagacttcccacgtgttagcaaagatgtacatgcaagggtgcacactgtatgtagctttgtaagagcagaaggctaagaacaatctaattgtcaaccagtgggttaaaaaataatggttccacacaatcaaatactatgcagtctttaaaaagaatgaagatgctttataagtgctgagatagcaaactctcaaaaatatattaagtgaaaaaagaacagcatgtataatctgcttcagtatggaaatacggacaggggacagagcttatttctatgtgttagtttctgtaaacataaaaccatttctgaaagggtgcccagaaaggtgcaaagagctgttgagccgttgcctctgaggaggggaattgggggaatagaatgagaaggagacttatttttcaatttattctcttttttttagtgcttgaactttttttttttggactggtattcatatttttaatcaatatacaaacagaatgttaaaaaaaagtttttgaagactgtagcaatgtaagtaaattcttaatatataaatgcaatggtcttcccttatttgtggtttctcttctcatttcagttacctgagatacagtacaataagatagagttttgatagagaccacattcacataacctttgtatgttgttacatatgtgttcacattcacacattatatgttgttacaattgttgtattttcttattagttattgttaatttcttcctgtgcctaatttataaattaaacttcatcataggtatgtatgtataggaaaaaatacagtatatatagggtttcgtactatccacagttttagacatccactggggatcttggaatgtatccccagcaaaaatggtggaaatgtgatcatttcaaaagcagtgaattaaatccaaactgatcaaagccctgccagccagattgattgaggaaaacaaaataaagaacaatttcacaatacatgtctatattatggaagtgtaaatgacagcctctttattttatggtttttattttgctgctaagtatcagttattagcaaataatgcaattcttttttgaaaagcgttcatctttgttgtgttggtaacttcactggcctgaatgccttctgaacattctgttagcattggaaatccaggctagaaattccaaggatgttctgcttgatgtagaaagactcaaatctttttcttatatctgtatcctagacatttgaacaaataagaaaacggaggataggcctgtttgttaaaatttgccacaaacgtgagtctttctagacttaactaaaatgcactatggcagcatagtcactgtattgcatttatagataatattggaaatcagtgtttcctaggacttgttgtctttagttagtgaaacttaatattgatacatctgaaaggcccccaaacctgatgttagataaattcaagagactaggacaatttttacttttacataaaataaatttgttaaattattttaagagtgctgcagtccttctaaaaacagaaccaagcaatctatacaaatcaaataaacttaattatctgtcacttttagttacggaaaagtttattaatggcagaattaataagacattgcttcaaattttaaaaatcacagatggaacacatttttaacactgggaggtaaagttaaggaatttttccagaaagagcaaaaattaataaatagaaagcaaaacataataaagaggagaaaagcataaccagccagggaagcccaacatttcaataataggaattcaagggggaaaaaaagagagcagagcaaagtaaatgaggaaatcttagaaaaataattgaagaaaatatcccaggaattgaaatgcacaaattttctgattaagaggccccaccaaacacttggaaagtggaagaaaatagactgagacacttcactgtgaagtttataaacattgtttccacaataaaagcaaattatatacaaagaactactcacagtggctttggatttcttcacaccgacattggaaaccagaatacagtggaatattgcctttaattttcaacctggaattgcgtacccacaaaaattatccgacatttttattgatgagagagaaagtaaatcttcatcctccattgtgggacatcagttgataatgcctaaaattgaacaatcaagaagtgaaattataagcatgttattaacgataatggaggtctaaatgctggaagaatcaactctaagaattgagagtgcatgtctctgaggaagaggacatgattgcattttcaaaataataagctgtgtagaaatgtttacttgacttgaatttttttagattgcaaagtaaaaatggaaagattattctagttgcatcagagagaatagattggactggaggcaggaagacaatttaggagctattgtaatacaggcaacaagcagtgaggacctgacctaaggcagtaaaggtgcccatagagcaaagacaatggctttagaaaatagagaaggagcacatttggaggcaggagctgccttgagtttggaggtagccatttagagatatgtaggaaggagagaacatttcaccctggaacctgggaattaaaaatataaatttgcaattgtagttagaaccagatgagttggaagaaaatgaatagaaaacctatgaaggaaaaataaggatctaggctagaacatattttcctaatagatttttattgaggcagaaaaatgccctcttaaacattcttaatctaccaagttcagtcatatgtgcaacacatgttaaggaacacaggtgcctgtatgtgcatgcattttataacagtcaatgattagatcatacaattggaaataatgttttttggacttctaagtatattctagtacatttctttttttttcttttttttttttttttttttggaaatgccaaagataataaaacctttctttgtaaagaattctggagaactttattaacatgtaatgtaatatgctgttttttgagtaatttttttacaaagtattttcagcatgtagtatccagtttaatcctttctccagcaaaaagagttaagtattttatctctaaccttctatgagcagaaactgaaatggaaaaaaagattaaatgatttgtccaagatcatacagtaagaagtttcagttagaaatgtacatctccccactcagttccccaggtttttaactcattgcatacctgagattgggcaggaacatgatcctgaaaattaagggtgagtctagttcaatgactgacattcagaaatatgtgttgatgccggacacggtggctcacacctataatcctagcacttcgggaggccgaggtgggcagatcacttcaggtcaggagttcaagaccagcctggccaacatggtgaaaccccatctctactaaaaacacaaacaggagccgcatgtggtggcacacgcctgtaatcccagctactggggaggctgagacaggagaatcacttgaattcgggaggtggaggttgcagtgagccaagatggtgccactccatccagggtgacagagtgagactcaggagacgagagaagagaggagggaagaggggaggggagtattttttaatcaaacccgttagcagcatgcagccatttagggaaggaaggtgattgccaaacattgatacattgtattaatgcaagtatcaatataagcattaagaatttactatgtggattaaaatttattctgtagattaagttttagctcctctaaagctttagtaacattttgagaattttgtttttatttgtttctgaaatgggacagattgagataagaataagcattacagttgagccaatgaagaatactgttattacaattgagcaaatgatgagtactattattagtcaggatttatgtactattagcttctattagatattattgtatatatatgtgtgtgcatgttagatgctgacaaggttgaagagaaaaggaaatggcttatacactgttggtgggagtataaattagtttggtcactgtggaaagcagtgtggtgattcctcaaagacctaaaaatagaactacaattggatccagcaatcccatcactgggtataaacccaaaggaatataaataattttactgcaaagacatatgcagacatatgttcattgcagcactattcacaatagcaaagacatagaatcaacctaaaatgcccatcagtggtactggatgaagaaattgtggtacatacacaccatggaatacgatgcagccataaaaaagaatgagatcatgccctttataggaacatggttggagctggaggccatcatccttagcaaactaatgcaggaacagcaaaccaaatactgcatgttctcacttataagtgggagctaaatgatgagaacacgtggacacaagggaacaacagaccctggagcctacttgagggtagagggtggagggtgggaggagggagaggagcagaaaaaataactattgggtattaggtttagtacctgggtaacaaaataatctgtacagcagactcccatgacatgagtttacctatatatcaaactcgcacatgtactcctgaacctaaaataaaagctaaatgtgtgtgtttgtgtgtgtgtgtgtgtttataatattatataactaaagtgggcctgaaggtatttgggttctcttgctcttgagaaacataaattccatcattgcttagaagaggtagtttttttaaataaatgaaatatagtacaaccactatggagaacaagcaattgcttctaaagttaagtggtccgtgcttaatagaccacttaataattccactcccaggtttttacccaagagatattaaaacatttatctatacagaaacttggacacacacatttatatttatattaattcatgataaccaaaaactggcagcaactcaaatgcatatcagttaatggattaaaaattgtgttatattcatataatggaatatgattcagcaacagaaaggaatggtctactgatacacataataagtgaatagttactgtctgatgtatatgaaatgacaggaaattctaggacaagcaaaactaatttatagtgacagaaaacatcagtgattgcctggggccataggtgagggtggaaatttattacagaagagcacaaggggacttttgagatgatattatatattttcaatagggtgattgttttaaaatgtacttgggtttgttttagtcaggtatggtaaagtgacaggagacaactgcctttgaaagaggagtttaggccgggcgcggtggctcacgcctgtaatcccagcactttgggaggccgagatgggcagatcaggaggtcaggagttcgagaccagcctggccaacatggtgaaaccccgtctctactaaaaatacaaaaaattagctggacgtgatggctggcatctgtaatcccagctactcaggagcctgaggcaggagaatcgcttgaacccgggagccggaggaggaatctgggctggagtacagtgagccgagacctcaccactgcactccagcctgggcaacagtgtgagactccgtctcaaaaaaaaagagtttattacttacagtcccttagaggagggggcgcagcataccattcaaagccacagggagaagcacctgggtcagtcaggaggcagaaggagccaggggaaagcatggcccagagcctttgttgtagtttccccaggaaagacaaggtaggatatgaaaagctgtttaacattggctagcttgaataatttcagtggtccctggcctataaggtagtccatctcactccagtgatttaggctggagaaatattggcttggtgtgttagttagataaaggatgtgattgaggatatgggctttggattggttggtttgcgtatgaaagacacgctcacaggggagtcatttgcaatatataggaattagctagccctggaaggggcagtatcttcccctctctagcaagtcctctaagatgtcaaatcatcataaaatttaacaaaaagccatgattaatacagtgatcactgtaaaggtatatacatttgtcaaagctcatcttaaagtggggtgcattttgttgaatgtaaattatccttcaataacgttactttaaaagtaaaaaaacaaaaaaagttaatgaaatggaccaacagtccctgatgtaccttagttcaactcaagatttttcaactttacaatggtgcgaaagccatgtgcattcagtagaaactgtactttgactagccatacagccattctgtttatcacttttagcacagtattcaataaattacatgagatattcaacactttattataaaacaggctttgtgttagatgattttgcctaactataggctaatttaagtattctgagcatgtttaaggtaggctaagttacgacgtttggtaggttaggtgtattcaacacatttttgaattatgctattttcaagacttaggatgggtttatcagtatatagccccatcataagttgaaggggcatctgtaaatgggtacatgaaattacttaaaacaagccaggaaaattcatcctcaagtgcattaaaaattttcaaacaacacctaagtatataaaggcaaagagcagcattgaatacttaagaattacaagttcatccaggcagttcctatttttcttccatatgtcataaccattttcatgttatggcaaaagaaaaaggtggcattttcagttatatggtgtctgagtttatacaacattttggagttctttcctgccatattcctaaggaatactaatatgtatttattttgatagttaacaataaaaggcttcactcagcttcttcaggtttttcagtgatgaagttatatagcatccagtccatagttgagtatcagtaatcatgagaaagctctttcttatatccagttgaaatttgcctccttgtaactttgtcttccttactggtcctagtcctgtccactggagttacgtaggattcctctaatcctgcttctaaaataacagttcttcagatatttgaagatggctagcatctccccttgaatttttttatttcccaggttcgttcctttcccagctttttataaaactcacttttccctattactttgtccttgccattctttgttttactgactttcctttatttttaatagttgcacagagacattctacattgatttccatcagaacacccttgtctataggtacatgtatgcatgggaaagggatgaggggcagagggagagggagaagctgcactcaggagagcatgaggagtgtatatatggaaatgacacacaccttgggaatgaattctggcccatctgagtgaccttgagcaagatgcttaattttctttgagcacctcagtttcttaacttgatgataacagtgcagatcctcatatgtggatgaggtatttgtgaattacctagtggtaggtctagcacatagtagcatttgttgcaaaagagctacagtgtagaatacaatctaggtgaagctgtcatccatggcttcactgactggttctaggctgaaaataagatcttgtgtgattatcaacctgttacattttaaaatcaagaggcacagcctaacagtagaatcaaaactggaagacggcctgtcaaaagagcagctgcccaatcaaagtaggttagtaacattatcttaatgtataaagaaaagcctgttatgaattacctaaagctctgagacattaaaagactcattaccttttttatatttgcatgttttaagttatcctggccaaatttattatattatggcatttatctgaatgacagtatgtcagtgtgatgatatatgacatgtttattccctaggaaatagtttcctagaaataataatctagattgacatctacatcgcaactctgtgactggtggccacatacacatacaagagcatgcacttatacatgtactcacaacatgggttaaagttaatcagcatgttgagcatggagcaaattattttctgttattctcttatgtttctttatctacatttatttttaggaaccttaacaaagcagcataacaaagacaaagcagtgtctgccttagatttcttcaacaaggaataaatggaaaaattttcatttacatcaggctgtcactttgtcaagtaaccaattcacctaattttcatttttaatcaactctctttaaatatggcttattaactaaaataaaaagtaatcatgtaactggtttataaagcacattgtattagatcttgctatcattgattgtatttgctgtttgcattctttaattttattcctttctgatagatttttctatttaatatacttttcagcaatttaagaaaagtcaggttataattttcagaggtttttccttataaactatgaaggatgcagtggctgttagtgctatactatgattccttgagtaaaaatgcacacttactcaaggaatcgtataaggtttattaaatactgttagattttatgtaactatttaatgcatattttcctctagcatatttatattattatccagtcaaatcagaggatcaaatcagaggatgcaatattgtaactatccaaaaattttttaataagtgttaggtatatttattatataacttattcatgtttaataattataatagaattaaatgcagcaatgctttgtgtcacagcaaaaaacaatacagcttcatttgagtgggtgtcctacatgaaataccaagatattaggaatacagttaaaattattttgatggcactcctcttctaacatagtatttcaaaacaatgaaaataaaaacatttttttctgattgcaaaagcagtatttattcattggggaaactttgtaatatcactttataagcataaaaaggaagattatgtagcactttaatgccccgctgagagatgcatacttttaatattgggtaatttttctcatgagttatgaaaaaaataactgaaccatactgatctgtaactaacacttttttttggagtgaaaacagagtctcagtctgtcacttagtctggagtgcgtgcagtggcacagtcagggctcactgcaacctcaacctcctgtcgtcaagggatcctcccacctcagcttccagagtatctggactatggatacgcacctggccaatttttgtattttttgtagagatgggttttttgtattttttgtagagatgggtttcactgtgttgctcaggctggtctcaaactctgggcttaggcgatgcttccacctctgcccccaaaagtgttgggattacaggcgtgagccacagcatatggcaataaccagcccctttatacaaaaacatgtcataagcaatttttatatttcttaatattttaagaaacatttttaaaaatggctttattataaaaatataccctaattctaagttttacattttttgtgtattttaaatagcacccttaacatttctttaaaggtaatgaggatgatgataatgatgatggctttacacattacaatgatgattttttgagcaaaattcctgcatgtggaaggaaggaaggtctgggccaaaaggaatgcagaattataaagctcaggatgcacattgccagagagtttgtaccaactataatacaggaagtaaatgagcatacccctttcctcagacttcccccaaagtttgtattatcatttttctgccaatttagaggcaaaaaagtagtattattttagaaatttgcaattctttgatttttagtaagtcttaacattctttctgatgattacttgttaaatgttgtcttctataaattttttaagtccttactcatttttatagtagagcattatctcattgttatttcttttatattagacaagaatacaagaaccatgtccagtatatcttttccagagtgcatagtaatactgcaaacaacatctgttaaatgaataaatgtatgtctgtatgtctattagaatttttaaattttttcccaatatttaccttttaatttttaacagctatattaggatacgattggcatacagtcaattgcatatatttaaagtacaatgagataaattttgatatacgtatatacccttggaaccttaatcataatcaagataatgaatatattcttcacctcgatggatgggtatatgttgtttctcaggtctgcttatagagtctgtccccccaaccttctctgtctcccctgtccccaggcaaccattgatctgctttctgccactatagtttatagtctctaaaatcttatgcaagtagaatcatagagtattgctctttaatgtctatcttctttcgtatagcatcatgtttcttcatttctattgtgatgtaggtcaacagttcctttaaaatgctgagtaatgttccattgtatgtttatatattccatctgttggtgaacatttgggttgtttctggcttggaactactacaaatatagctgctgtgaacattctttgtacaagtttttgtatagacatttgcttttgtttctcttgggttggtaggaagggattagctggatcctaaggcaggtgtatcttttcttaataaccagtgatgttgaacatcttcttatgttcttatttgcaggccagttatcttttttggagaagtgtatgttcacctctttagcccattgtaaattgggagatttgttttcttatttagttttgagagtttttatatacaatttctttatcagattattttcaaatagtttctcccatttatggctcgtcttttcattgtcttattgatatcttttgaagagcagaattttgcaattttgatgaagtttagcatattagtttgttattttatggattatgtttcagatgccatgtccaagatacctttgcctgactaaagggcacagtattttcttttagaagttttatatttcagaagttttgtgttttacatttgggtatatgatgcatttcaaattttgtatatggtgtgaggtgtggctcaaagttcttttttgttttttgcatacagagaaagcatcatcctttgttgaagggactattcatgttccacagctttccctttggactctcatgaaaatacatatctgtgtagatttatttatggactctctattttgttgcattgatctatatatctctttcttgaaactaaagtagcattagtctgatttctttcttcttttttaagaaaattttgattattctgagctctattttcatgtgaattttaaaaattaaattggttaatttctacaaaaagtctactgggattttgattaggatcacattgaatttatatatttatttgaagagaattgccattttaacaacatcgagtcttccaacctttgaatgtggtatatatctcttcatttgtttagatcttttaaaatttctctctatgagtgttttttagttttcagtgtataggtctttcacatactttgccaggcttatccttaattatttcatttttatgctgttataaatggtgtctcaatttctgatttattgtctcaatttctgattatttctaggatacaaaaatataatttatttttgcatattgattttgtattgtgtaaccttgctaaactcagttattagaagagctttttttgtagattctattgaattttctaattagacaatcatgtcatctgcagataaagaccattttaagtcttgcttcacaatctgaatacattttatttatttttgctctattgcactggctagaacttccaatacagggttgaatagaagtggtgagaatagatatccttctcttgtttgtgaacttggagggaaagcattcagtctttcattatttagcatgattttagctttaggtttctcataagatgtgtttcaccagagtgaggagttcctttctattcttaatttataaagggttgtttttttttaatcagtaatggatgttggattttatcacatacaatttttgtgtctgtttaaataatcatgtagttttcttttataacattaagatggtaaattgcatttattttgaatgttaaaccagttgtgtattcctggatatctctacttggtcatgacgtattctcatattgttggatttgatttactagtagtttgtttattacttttgcatctgtgcttatgagggatattgggacataggaatcttttctatgtctggatttgtctggttttgatatctagataatccggcctttttagatagtaaacatttcctccttttcaattttctggaaggatttatatataattggtataatttcctccttaaatattcagtagaagtcaccagagaagacatcagggcctagaggtctaagaattctagattacagttgttattattgtttattgtcttcagacttgcattatttttgtttttgtttttttctttttctttttttttttttttttagatagaattttgctcttgttgcccaggctggagtgcaatagcacaatctcggctcactgcagcctccgcctcctgggttcaagcgattctcctgcctcagcctcccgagtacctggaattacaggcatgcaccaccatgcccagctaatttttgtatttttagtagagacagggtttctccatgttggtcaggctggtctcaaactcccaacctgaggtgatctgcccgccttggtctcccaaagtgctgggattccaggtgtgagcctccgcgtccagccagacttgcatcattttattaatagtaagaaatctgttgttatccttatcattgttcctttatatgcaatgtgtctttttctctgggtgctttaaaaacttttttttttcaccagttttgagcagtttggcaatgatataccttaatatgttttcatgtttctcgtgaatcagtgttttgagatgtttggatctgtgtgttcacagcttcatcaaatttggaaaatgttctgccattctttcttaaaataatttttttgcccttccatctctcccctcttcaaatactggtatgttaatcttcttaaagttggcctgcagctcactgatgctctcaattctgatttttgttttttgtttttttaattttactgtcttctccattctgtgtagtctcaatagctgtgccttcagatttgctaatattttcttctgacgtgtctaatgtgccattaatttcatgcagtatatttttcatcttatacattatagtttttatctctagaaattttatttgaattttttcatgtcttttctacctgtacttaacattttgagcacatgaaatctagttacacacttaatgtccttgtctgctaattctaatatatgtcagtcctgctcagttttgattgttttctaaattatggatcatatttttctgcgtttctgcatgcttgataatttttattagatgtcagtcattatgaattttactttattgggtggtagatatttttgtatttctataaatattttgtgattttttctggtacatagttaaaatagtttgaaacagtttgattctttcatgtcttgctttaagatttacgtgaaaccagagaaatgcacagtttagaattaagtattcccccctactaaggcaagacccttctgtgtactctacccattcctttgtggattatgagtttttttaccctagctaatgggaacaggcaatattcccgttcttctgtgactgtagtgtaccttggacctttccctggtcttggggtgtttcctcacttgcctgtgctgatcattacaaaggtaaataacccagcgaggaccctctctgttgtgctgtgtctgtgtgtagctctcttttccagtattctggaaatctctgcaaggatctgtcctcacatagagctcatcgcagttgtttcaatagggctcattgcaattgtttcctggctctcggggatcagtttttcttgacctgatgatgcaggatttttctcgacccctttgtcagatttgcaatgggggtgccctgtttactcagcctgccacactcaaccccttgcaggagggagcacgtgagcaagcgagtgggttcaggctggctgctttgggtgccggcaggagcaagctccatgcacaccctgtggcggtgcccaggtgggagtgcctgtgatccccagaatcccagagggcatgctacaatgccctcttagcttagctttaccgtttatggacagcagtgttatcagctcagtgggccccttgtcttgtcatgtggggtgtctacactccaccagcaagggcaaagggctagtgtgacagccttttttgggtacctgcatccagtgggtcccaagcccttgtgtggtgtccaagaagaacgaggtcatgctgacacttgaaggatggtggaggcagataattttatttagcgatggatgtctctcagtggagagaggagctggaaagggggatgggatggtcaggtaatcttccctgaagtcagagcgtccctctgaagttaagctatctttcctctgaagtccagctgtccctctgaagtcaagttgcttctctccagtcaagctgcttctctcctctactgactgagtccagggtctttagaggcacagaatgggggtgcagggcaagccatgggtagttttggaaaaggcaacattcgattggtaaaaagacattattcagaaagaaccaatcaggagagaacaggcaaacagggatagaagttctcaccttgggcagcaggtttcaggctactttgacttgaaggtgctgtttcactggggacccgcccctgtctgcctagaatttctctgcctcctgcttccatcactgatgttcagtgttttgaagacattgtttcatatgttctgtctgtgttttggttgtttcaggcagaagcatgaatctggtctctgttactccatcttggctagaagtaggaatcatgccttttaattttgtccaattttcttactttaaaaatatttaaaattttaaatagaaaaattcatcagtctttaccttaatgggctctgtacttggtgtcatgcttaggaacatttttttgtttaagaacttataaaaaaatttacttctatttttcaaatatttgaattgtcttattcagatattttattaatatggaacactacattatacacaatttggaaaatagctaaaatatggggaatgggggagaacacctgtaattccatcaccaaacacactgtaaatttatatattgacatattttcttccatgtgttttcctgtgcctttattttttgtgtatttgtaatgctggtgtccatcatttagcatgttcatccatgtttatccagtgcatcgcatcattaacattttttatgttgctacataatcttcacagttgcattttaatgactgagttatatttcatcaaatgattatattacaattatattacctttatactgttaagcatgttagctatttcttcttaaagtatatgaagcaattatcagagagtacattttcagagaatcctaactttgcctacttacacatgaccccatgagagcagaagtgtgactaaggcccctgatgtgtcattgcatctgtctctaagcccattctagtacattcaataaaatcctatttgtagaaaaatgagaagaaaataaaaacatcaattcttaatagctcaatccatttcttattactcatatagttataaaacaaactttaaaaaacagcttagaatttctatatttagtatgcattaacatgctctctcaattactttctaatacttatttgtgcttgcttatttttaggaaagatactattcaagtccagtacatcataatgcagaattctgtatcagtaccaccaaaagatgaaggtaagttaaactgctgaggaaaatggtgatgagtctgttatagttttaatttgatacattgaatgtcattgacctctaatcataaggtaacttatttcctagaattaaaaataaaaattataattatatatgaaaactcatttcttttggtaaataatttgagtgtatatggattcctgagttttaaggacctgtctcctttataggctatagcgccttgagagcccagccatctcattccacccaaaactcacagagccctgcttattcactggcagttaactggcactaacagatatcagtaaaattaaaaagtgttggctttattgaagcaaaataacacaagtattttagtgagtagaagaatatatgcatatatattcacacacacatctgtagacatacacttagaggatatagaatttgtgtatacatttctttgcctgtttcccctgatatccatttaaaaagaaatagaaaaactattttactttttgcaatgtataaaaaataaaataatgattttttaacaggcacttctggaccttccagaagaacctgtacctccagatggaggtagagtcctttcttcatcaagagtaattaaattaccctcaccataaagggtacactctaaccccggggagaaataccagtctttccctgccccatctagtctcttccacacagaagagaagttctgacatgtatgagaaaaaagacatatctttaatgaggcaaaattaggttgccttagtggaacatgtagcttttagtgaaaggagggaatttgttatgaaggacccttaaatagagcaaacaccctttgatctctctaccagtgagaaaggtagtatcataactcttgagcacatggaatctggatttgaaactcagtcctaccacttaactgtaaaactttaggtgtatcacttgacctcagcttccacatctgtaaatctataaaatgaagataataagttccactctataggatatgtggagactaaaggaaatagcatatgtaaatcacctagcatattgttgtttgcatagtaggcacttatatgatgataaaactaccattctcaatggctattattaatatctgggacatcctcatctttgagactggtcagtgagatggccatgaggccgcctcttgcctgggatgcctaatggccttggaaggccaaacatgctccaaggggacccatggggagtaagcaggaattagaccgcttggtttgattcttacccaggagttgatccgaagagagagtgagagtccttgagactcacacaaaatccagccgggaacactagggcaagaaaggagatgggcaaaccccaactagaaataaagagcatgtgtttttcttgagtgttctctggtatatatcctctggaagatttgtgcagcacttggtagctgatgaagggtttgaaattcagtgtcctagctggtattacctttttttatccaagcaagcaaggagaagcttaggagaaaaaataatggaacaagtatcaggaaagctggactccattccatacctgcctccaaccagctgtggaaccccaggcaaagttattttgcccctgagcctcagttttctcattgaaaaatcgagaatgactaggtgttcctttcaggctctaaaaaggtgagtctatgtgagtaactaagcaacaagctgcttggctctggctgatacagagggagaaagcactcacacctcttggctgctttgcttctcatcacagtttgttttgttctgatgcctacctctctgggctatcacataagcttggatacttccattgaccggaaagtaagaccccttggccctacccagagctcaagtaaacctccttacccagtcttttctgggactaaagatgcttaagcccaatcctggaatttgacagaggatatataatagcttaaaaaaacctcaatcatgtgcctccattgtgataatcattctacctacaactttacatcctttatttaatcttcacaataagttagacgtaaaccttattttacaacttcaagattaggtactttttgccaagaccaccaaccagtaagtgactgatccaagatttgaactcagatctatcataaaatttataaagaatatttatataaattatagagaatatatatttataaagaatatttaatttataaagatatttctataagaatttacaatttataaagaatatttctaataatttttgatcatctcctttttctctcatcaaacatactatgcttaattacacatatgaatgcttaaagccattttaaaccaaagtgagcagaaattataacttaaattatggaaaattacatcaataaggaaaaataatatatgtgaatacatgtaagtcctatgaattgcccagttattcattaatttactcattcattcattcaaatgctttctgtatgtcttagattaatattaatattttttaacaaaagcatcagatgtattaattatgattctgtttatgatcaaatataatttatggctaggtacagcagctcccacctgtaatcccagcactttgggaggctgaggtgggaggataacttgaggccaggagttagagaccagcctgggcaacatagcaagactccatctctacaaaaaaatttcaaaattagctaggcgtgatggctcatgcctatagtcccagctacttggaaggctgagctaggaggattgcttgagcataggagtttgaggctgcagtgagctatgatcatgccatggcattccagcctggacaacagaacaagaccttgtctctaaatatatatatatatatatatatatatatatatatatatatatatatatatatacacacacacacccccacacacccacacgtaatatattacatatatatttgtttaattgcatgtacataatttgtgtgacatgagaagtttgctgggcacatgctatttattaattaaatgcagattgatttatttaacaaaccattgatggctagctataaattatgatacctttgaatttccaacttataaacacatacacacgtattatatgcatttctgtataaaattcagataagacatcaccaacagagttgtgaggcttaaattaaggaaaatatgctgtactaacatactgtccccaaacaaagttcatatggtagaagcaggtttaatgatcaccaaggtaattcatacgaggaactatcagatgctatgaagaatccaaaggtaaatcatacagagcctgagcttttaggctctaaaatcctgttggaacagcatatgtgcatgtccttaattagaataaagcatgactaatgctgtactagaagtgagtatgacatactttgaaaatcagaatgaaaggacagttggctaagccagagattttgaggctggtcaggaaacaaaatggaggagatgacatttgttcaggatattaacatatatgtacaagtcaagcaagtggaatttaagccaggggtttaaagctaggaagagctggcagcattattaatggagaaaacaaatttgaaattctggtttcttctatttaaatgttatctaatttcagataaagagatttaacattgtactgtcactctaacgataagttatactatattacagatttttctattataaactagtgtcaccgttattcctttctgtgtgagaatataatttatagaattttgagatgttcatgagacttattttgttacaattttctatatcattctttcaggatttagggatagaatttagttttccataacctcctttttttgtctgttattttcaaatgatgagctaaactgtgtttttcaaaaaagaggcatgaaaacaacataataaggccaactatttagatttggtgaaagaaagacaaagtcaccacactgattaaaaatgcaagtgaatttatttacttcccatataagaaaactcatacaggtgagcagtatcaccaaatgattctctgacagggacaatgtatgtgtcttatgtgctaagaagtagttcactgtgattatgccaattgaccattgaagtttgtatcttgggtagtcagaatgaattttaagttcctacacagttggttaatgcaagtctcattgttcattggtcaggaaggaatcttcatttaagtcaagtgagagtctgttttactggagtcaattcttttttttttttttttttgagacagagtctcactctgtcacccaggctggagtgcagtggtgcgatcttggctcactgcaagctccgcctcccaggttcatgccattctcctgcctcagcctcccaagtagctgggactacaggtgcctgcccccacccccggctaattttttgtatttttagtcaagacggggtttcaccatgttagccaggttggtctcaatctcctgacctcgtgatctgtccgcctcggcctcccaaagtgctgggattacaggtgtcagccactgcgcctgacctccctttttttttttttttttttttttttttttttttttttttgagacagagtcttgttctgtcacccaggctagagtgcagtggtgcaatctcggctcactgcaatctccacctcccgggttcaagtgattcttctgcctcagcctcccgaatagctgggactacaggagcgcaccaccacacgtggctaatttttgtatttttagtagagaggggattttaccatgttggccagactgatcttgaatttaaccccctggcttaaattccacttgcttgacttgtaccttgtaatccgcccacctcagcctcccaaggtgctgggattacaggcctgagccaccgtgcctggccgagtctctcaattcttagtcacttgtcagccttacagttaagtttgccatttcctagacaagtcttctgcaagtagaaaagttttcttatacagttcttctaccacttttctcaactctgtcataacatttgtgttatttaaaggtagttttcaaattgtgagtgttatttctatttcataaaagtaagaagtcggggtggagagagcaaatggtttgacgcagacacacaggcggccccctctggacccactgcagttagctggacatgtgctgtacagctactactaatttcccaaatctttacatgatttgactgcacaaccacagccattactgtctatcatgtgaattcatatttgaatcttttttaaaaacccctagattttctgattcaataaaaaatggttatgatactgtctaaaaaatgtattctatgtcttgcagacataaaagtgtatacttacagcttacagacctaacattttggtatttgtgaataagaatattagaactcaagtaaggcatacttagggaggagctagttaatactcatatcattcttaaagtttgaggaaaagaccttacttattttggacttagtatcaattaggtcttttataaagttcttgatgaattttctatctttagtaggatttaaagcgtcctggcatgtagtaggctctcaaaatgcatattaaattatgtataaaatgctttaaactctcaaacagtttttataaatcaatcacacctgttgctgtgaaaatattgtcatctttttttttaatgaaacaccaaagtggatggaattctaaggccaatgaaagcaaatgttcatttaacaagtatttattgcctttgaagagacaatgagcaaaagaagcaaaggggggaaaataaaaccaaactaagctcctctcttgcagctgttgtaattaataacactgggctgcctatccaagcaggggtttccttttatggggatttaacctgaaagtggtttattcttgttatctaatcgtagtttcactctttcgaacatggtatgaaagctattttcttaagctctctatttttttcttttcctccttggccatatctcccctttcctctccatctggtgaaggaacactgatctggacagctgagctctggtcattgttacatgcttctttttaggctctgtgatcttggccaaataagtaaacctcagtcccttcatctttccaatggagatagtaattctcatcctgtaacagtcaaatgcagtaggtatggttgattctcattatttgtagtgtttatattctagaaggctattaggaacactgaattagcaaatactgagccatttgttcctaggcgatattcaaggataggttcttgtgagcctctagtcacaacatttttgtcaacagctgatacatgaccttgttataagtgtatttctgttaaaagatactttatttaatagacagggttaattttttaacattgaactcagagacacagcactataactcatgccccaacaaagcttctctaatacaagtgttttctccgtagagcacatcccagttctcttgtgttaggagcactagacagcacccagcactatgctggagaccgtaagtaaacagtaaaatcaccaagaaaaagaagcacaaaaaatgcaaaaaaaaaaaagtgacagtttttgaaatgtaaaaaggatgcgtgtttacagtatgagagctgaaagaagaaggcaggacatcaccttgttctgcctaacctgggaatttgcgtgtcaagtggctcaaactttttttttctccacacatgtccatgaatgaccgtgaaagcaccacaagtattgattttggggttaaaaataaattttagcaagtaggcaaattcacaaatacagaatctacaaataatgagaatcaactgtatatgaatacaccttgtaaaaactttgaaagcacagtagaagcctcaggataatttacagaataaaagctattttttatgacgtttttctcagataaaatgactttgtgcattataaatttcaagttaataaagtaacatattatttgaaggtgaccataaattcttagttcagtaaagctacaaagaaaactactattgcaagatctgtgactctccagccctcacattgaacacacagtagcaaggagtaccactgtaatttgatgctttgcatttagtgcttaacattgctttatgacctcactattgggggaaaatatcattccctatgtattaccaaaatattatgtttccaaatatgtgatattcatatggaaacattttgatcttaacaagtggtgtaaatgctgttcttggacttttggtaccattttatgctgcagagcaagtacagattgacatttgcaagctggttttggttaactacttaatgttggaaattggaactttctgatgtaataacttctacaaaataccattgtgcattattagtatgttatactgttgacagaagaacaaatggaaaacacacacatgcctgtagaaatatccttttagaataaatggaaatgacctgggtggcctaaaaccataaagtagaccagccatatatggaagttgaaataaaatattagagtttaaaatattagtaaatttagattatgagtatttttgttgtttaaaatagctgtatttctttctttcctctttcttttcttttcttttttgttttgtttttgagacggagtttagctcttgttgtccaggctggagtgcaatggtgtgatcttggctcactgcaacctccgcctccctggttcaagcgattctcctgcctcagcctcccaagtacctgggatcacaggcacgcaccaccacacctggctaattttttgtatttttagtagaaacagggtttcaccgtgttagccaggctggtctcaaactcctgacctcaggtgatctgcctgccttggcctcccaaagtgctgggattacaggcgtgagccactgtggccggccgaaatagctgtatttctgttgcctgaaaaacaggctggtaatcggataatttacttgggtatgtatcattgtcagtgtggccgtttggcagcagagtctctcagaaattccaattaaccatgtaaatatatttcatagcatcacatctcactttgtcagaacccctgctgcctttatatcattaacataaatgcaggtgcaaatagcatttatgtactttgatagaaagcagttggagacatttcactgtgggacacaacacttccagattgtgtacatctgttcaaataatgtatccagccccagtgacatgaacacaaggatggaaacatctgcccctgagaccatttgcaatatagcagatgcttgcatctttatttatgcagatggttagtgtgatggcttgagcagggataaaagcaaagtagtttgacaggggtatttaggattttatgcaagccaaaaataaaggataggcattttctgtttttaaaaatctaatagcaataggaatagaaattcataaatctagtaatgctttttaatagagtaaacatattgttcttgtctttaaattaatgggcaacaaaatcctaaaaacatttatagaattccagcatctaacttgtattaattaggaagagcaacttatgattacttttgtttggataaaataattttaaatgactttgaatactttttgtttaaaaaaatccttcaggccgggcacggtggttcacacctgtaatcccagcactttgggaggctgaggcgggcggatcacctgcggtcaggagttcaaaaccagcctatccaacatagtgaaaccccatctctactaaaaatgcaaaacattagctgggtggggtggcgggcacctgtaatcccagctacttgggaggctgaggcaaaagaattgcttgaactggggagacggaagttgcagtgagttgagatcgtgccattgcactccagcctgggcaacaaaagcgaaactccgtctcaaaaaaaaaaaaattctttaaaaacactgctctgttttttgaaaagattatatactaccaagagtatcttgtgatgatatttcttaaaattgggggaaaaatataaatgtcatttgaatataacttatactccataaatataaatttaagtaagataagtttttgaaacattatataagatttttgtcaagcattttatttggttcatattctaatgttgacagctagtgatattttaattataattaatatttgtgttaggatgacttaccttttaatactttattatcaaaactctctcctattgatctgccatgttatattctcaaggaaacaaaggtgaagggaataaaacctaacaacaaaaagtaaaacatttctagatgtgattttctattctcattcacacaaacctgcccactcgtactcatcaacacacacaattatagaatctcaaaagacataggaagttagatttcatctaattcagttgttctcagactttgtagcttcaggaccctttacactctcaaaaattattgaggactctaaagagcatttgcttgtatgggttgtatctgtcaatatttaccatattgggtgattataaaaaatattgaaatatttatgtcattttgaaataacagctcattacatcttaacaaaaataacctagtttaacgaaattgactatactataaaactaatgacaaaaaccacaattacttttgcaccaacctaaatatttttctaaagcaaaaaaaataatgagaagactggcattgatttacattttctgcaaatatctttaaattctggcttcattgaagatagtttgagtctcatatctagtcctgcattcagtcagttgtgatgttgtatatgttgacatatttttttaaaagccagctttccagtagtcagaaaggaaggggatattttggtaggcttttcagataatcatggatatttttctttgatactatgccaaagtttgtcagatggaaacttctttcagtttaattgtactgtgaaatttgaaaccctgtccatgtacttttgtattctattagattttgagtctcatacttaagtgattcttttatccacgcatgtaacgttaaactaaactggtcatttagaaaacactagttaagtgagttaagcaaatcttccatatacttcattgtgcgatattttaaaaatcattcattaacgtaagcaccagttttcgtttttggttttttttttttgagacagagtctcgctctgtcgctcaggctggagtgcagtggcgcgatctcggctcactgcaagctccacctcccaggttcatgccattctcctgcctcagcctcccgagtagctgggactacaggtgcctgtcaccacgctcggctaattttttgtatttttagtagaggaggggtttcaccgtgttagccaggatggtctcgatctcctgacctcgtgatctgccttccttggcctcccaaagtgctgggattacaggcgtgagccaccgcgcctgacccataagcaccagttttacctgaaaagtaactactgggaaacttcaagttcctggtggtgaattcaaattttccaaaattccaattgccacttgaaagaaaatgacttttatcattggcaacaaatactgttagaagttctttcttgtaatgccaagttccattcattcacttttgagaaaatgtctgccagatacccaagtcttaatatgttcattcaacatatttcagcatatgtctgtcagccattttattcaagtaaaaattgtattccatgaaaaaagtagccaggtcagctttacggctgaattgagtgcttgtcctcagaacaacagtcctatttccatatgcagcagacatgtactctgactgtgaacgatttcatcacagaatattaaaaaggcatgtactcaaggatcaaaattttataaaactaaaattttgtactgcttttttgttgttccactgtgagagtaccacagtgaagaatatgactgcttgaacagtttgtgggcactaccttacttggctaagttgctagagaagttttaccccatcagcgcaacaagtgcaaatgtcgacacaaggcaaatgacatcttgatatgagtatgaaaagagtattcgggacccttcctgaggttctgcaaaccctactttgagaaacactaatctaatctaatcccctcttgctaaagagaggaaactacggccaggaaggccgaaggattattatcttgctcaaattcattccagcagtataataaatagaaacaccaaagccagacgtctactctctatcatacacgaaatgcagtttgtcttgttttctctgaggaactcctcccccagccttccgcaaaaagaaaattcctcagatccaaatcattacaccatagcactgatatattatcaagtttagtaaaggagcaggacttgccacataaggaatttagaaattgttttagcattttagacttttctttcagtcctagtgttctttagtgtcatcagttttagaagaaggtggtgtaagattaagaagtatctaagaaatgtatattatttttaaaattataaaagacctttgtcattttttttcttcatttttactcattgaagaattactttgtcgctgcttaaaagtgtcattaaatgtattgtgtaattgttgcttcagaaaagtcagattctggtgtgagcctgatttggtcaccagaagttctgttaaaagaaggccatagatacagtgctgtagggtattgcgcattgctatgtgtgagttcattaactacctctccagtgaccatgctgtagatgtctcttagaagaaagacatgttctctctctcctaacagttgcactgtgattggaaaaaggttgttcaaaaagatctttcttttctcaacattgagatggattatgtggcactcaccggtcactggaagagactgacatgtaaacagataaattgctaaacaacttagttctaagttcagcgtgttggaatggagggagaacagctttggtgccagacagtcctgggttaaaatccaagtctcaatacctgctttgtgatcttgcaagaagtgttgttttcacatctatggactggaggtgttaataccaagaattggtgaaggacttgagatagtagattaagcattcagtctaacttctgactgaggggcattttagttgttcaaaatagaacttcaggattctaggggttcgagggaagaatagaaatagatgagtagaggcggtgtatatgtacacatctaccatagattgtctcaggaagaaaaggaaggagatggggcctaacgactctttcttgttgctgttgtttttctgtttttgtgttcagcagtagcatagcagaaggaagccatgtcaatatggttgagagttaatagttcgttccttcagtaaaaattatgttgtacaactgctagctgctgatctggagactgagaccctgtcagtaacaaaacaaacccctgctcttttggagctcacattttagcgaggagacagataatgtaatatcatcgtgaaggtaagtacctcgaaggacagtgaagcagaaaaagaaaatagcaagtgatcacatggagctgagcagctccttttagacaggatggtcacaggccagcctccctgagagctggggagctcaccaatggtgcagtatccccgaggcacaaggggcctggaaggaagggtagcctccagaccagggttgggaatactccatttccttattttcagatgcacctttttgtacattttaatatatcaggatttgagcattgtatatttagagttatagtacttctcctttcccccatcacagaaaaggtttttataaatttatttgtgtggcataatcaaagacaaaaagggagtttacaaataaaagggacagtgaatgagttcccacataatagcctctcttttttccacgaagtcaatgtcaaaaaacattggcaagagagagatggccctggggatagggcaggggtgggacagagggagagtgcctcagaagagcagaggaaggaatgtgggccgccaagagtctcttagggacaagtaaatagactgtggaatcggttttgaactagaaactttaaacttagaacactgtccagcgttcacaatggttggatttctccagcaccaaataacaggcggtggaagtggagagcacaaggtggggccagctaggcaaggttctgtaggaagacagcaagggggcgaacctacaatatgaggggagtgcgtgtggatgctcagccaggaggccggctctggaatgggaggatctacctaaggagaccactcacaggcacacatagcctcggggcaaggagaagcagtgggctgtgtcatcactccatctccagggaggtgggaaagttaactctgacatactcttcatctgtggatgagaatagatattcccttcaacccaggtttcatagtcatcactaaaagacaataaacatattgatggagaagaaggatggcagaattcaaaggcaaaggaatccaaagtagtcaccacagctttcaaactctgccgccttcactcttggtactggctcaggtcagaatctgatggcatcagtcacacgacaggatctgtagatgccagctaactcatagacaactaacctggtcagctcctcaaaggtgaccagcacaaaccagtcacctcagtacccaccagtgcctgggacttcatgttcttttttattattttcttcaaagtgtcagtattgtagatggtctctctatgttaaggaaaggtgtgtcttcattaaagaaataaggaacagtcaagacttaccagcagaaatgttagggaataattatcagcataacaggggaatacttgacttcttaaagatccgtggctgtccacccttgtgcatttgtacttacaaatcatgaactatttgacataaaagctgaggtatagaaaaacgtgcagcaaaaaaatgttataaatcactgtgagttaaagataaatcagcagtgaagataaagcatctgtaaaactctactataaaacagtgaaacaattcattttttaaaatgtagtttgcacattcctcaaaaatacctcttttagataaagtgaacttacttttgaaattatagtataaaagcgatatctttgtaattttggttccctgcattttgaaacattgtgatctttaccactttagtttcataatcatagtgttttgaccaaaggcaagaaacttccagccttttgcatgtgtcctagtttaattgttccaactgacttcacattctgatgttgaaaccttatctttctgtttatcccactgaggaaaaggttttcttcaccaactgtcatcttgttagtcatcaaagatacttaactgttgcaactgctattgaaaactaaaagtaggccgggtgcaatggcttatgcttgtaattccaacacttagggaactgaggtaggaggacctcttgagcccaggagtttgaggccagcctgggaaacatggtgagacttcaactctacaaaaaaatgtttaaaaactagccacacagggtggtgtgcatgtgttgttccagctacttgggaggctgaggcaggaggatcacttgaacccaggagtttgaggctgcgggtgagctatgatcataccattgccctccagcctgggtgatagagcgagtccctgtctcaaaagaaaaagaaaatataaagaaaaagggcccatttttagtttgttggtggaagatttcttgccatgccatatctgtgcagctcactaaacctcttttgtggatgtttccatgttcaccagccccattgagaaacagctgactcggcaaatgtcagaatgttctggaaggacagcgtgcacaggtatttgtgatggtgatagaaggtcaaatgaaatgacctgctgcttttcaccatgttggagttcagttatcaaggtccaaatttcaactgtaggactcaactgagtattaacaattttagtgataataacaacaaaaagaatattgagagaatggggttaacaaagcatttcagaagtttccatttgcctggcttagtgtccttggaaggtcattagctcttagttaacttcttatgctcctcggtcattcttagatttgagtaaagatactggcttggatgttttgtaataatgaataaaatcttttgcgtgctacaaattatttttgccaaaaaataaacaactttatctttctaaatgtattaaaaacaaacataatttcatatggctttcaaccattttttatcagaagcattccaaatcaaaaacaattccttccagaaataactaataaaagcttcataattagaatgaagaagaaattcattgaaattgagaatcattaaaatatattttaagtggtaaagctttttaaatgtacttttcccttgggacattaactatatggccctgaaagaataattagttacttcagtttatcaaccacattgtgttattttttttaattgccactagtattctaggtaattggcttttaaattctttcacaaagaatgcttgtttcctcttgcagcatgatatagccagccctccacatcctgttctgcatctgtgggttctgcatccatggattcaactaaccagagattgaaaaaaaatttcgaactgcatctatattgaatatgtatagacatttttttccttgtcatcattccctaaataatacagtaaaacaactatttacatagtatttacattgcactaggtattaaaagcagtctaaaggtgatttggggtatacaggaggaggtatgcataggttatgtgcaaacactgtgccattttacatcagggttttgagcatctatggatttgcgtgtctaaaggaggtcattgtcctgtggaggaaccaatcccccacagatggtaagggacaactgtatttatatatctcatttagtccattttaggggctatagttcctctttcagtgcctaacttttctttctgtactcaggctgtcttaaaacttataataatttattcggcaaaatactaaagtctgcaaggcaagtgtccctaaccccactctgggccccatcccccatcacagggccactgagatctgtacttaccccactttcttgaacaactactagggtagttgctttcttccctgctaggtttaagaccaacagttggcctcactacttactaggtataaacaaaagtgggaaggagtgtctccataaagtagctctttaaaatgcatgtatgttaaccctattcgcattgaattgttaatccaattagcactttatcaactgggatacaaaaatttacagaagggcaagtgggagtgggttctggacagggaatcaaagagcctggcaagacggattggattagatgttaggaaagattgagctaccagcgtgagtgtcaaaagagaggcacaagatttaaaatacagtttcattatttacaagcatagaggcaaaggaaaacttcctcttcacccctctgaaggttcactgataatgagctgacagatcagcagattaattggagaaaaggtatatacattgaatcagctgtgttacatgacacgagagctttcagaatgcagacccaaagatgggaaactgtccgttttcatgctgaggttcaacaaaacatggatagttgtggagaaatataattgaacaaaagggatgtcatctaatgctaatagagtgagtgaggaaacccagcaaggcttgtctgttttggattgctattgacctctctgtggaacatcccttccttctgggtatgaggcaggaccctctctggaatgcgggtccgatgacctacaatcaaacaagtaggtcagatcatttctttatggccaaggttagagtaataatttcaggttttatggttggctttggggaaaagtggttctggtttctatgactcaccttggggaagagggattctagattctatggctaatctcggggggaaaatgaagggccagggacagaagggcagagagatttttgcttctgaggtcttcattttgggaagctatcttttgaggccagcacaagtaatagccatttcttttctctttccttcatttacgtttcaaaatagaaacactactttaaggattcagaactacttccatatgctgatcattcaagatttgtgccttttttttcccaacaaaaataaatgtcaacaacctgatagtctctagcaagagaaagtggaaaactagtatatctgctgagcatctaacatgtagcaggaactacttgcaccatcatgggtatttttctcatttaatcctgacagggacctttgtaggcagatattattatgcccatttcatagatcctaacatttaggcacagagagtgaagtgccaaagccacaggtacatgacagagccaggagttgaaaccaaatctgtctaaaccccaaaacacacagtctttctactgaagatcagatgctggccataaccacacatagtagcttacagtcagcatgcagaggtagaaagagcctttggaataaaatgggctaggatttgagttccagcactgttacttatgagcttagaaatccttgtaaaacagacttggctgggcacagtggctcacgcctgtaatcacagcactttgggaggctgaggcaggtggattgcttaagtccaggagttcaagaccagcctggaaatatggcaaaacaatatataaaaaaatacaaaaattagcccagcatgttggtgtgcgcctgtagtcccagctacttgggaggctgacgtgggaggatcagctgagcctggggagtttgaagctgcagtgagccgtgattacaccactgcagtccagcctgagtgacagagtgagaccctgtctcaaaaacaaacagatacaacagtggttcctaattcaggttttttgggtattaagtgagataatgcatgttatatattttgcacagtacctaacccataaaatctgcttatcattgggataatattaaagaaacagtattgataaagaagctcagctcctcagaaaatgagaatttccttccctgcgaagtgaggtgatggatgcactgtttgacaagacaaatctcaaaggcctgtgctgagtggaagttgccctgcatgtcactggtggtgttaaggagggagaggggagttagctaagagcaataattgagcagaacacacaagtatgtcaaggagaatggactaaactagattcaggatacaagatctccagttaggaatgtgcttgtttcctttgcattgtctcaaatttcctgaaacttaggtctgagacatgatgactctaggaggtctccatgctgcagatatgtggactagaaatgcatttggcatcctgagtccttagaaacaaaagaacacttgtgcctattgccggcacgttttacagtgcatgctccatagtcagtgctcaataaattcctgttgactctgactgctgctgcagaccctggacagtagcttggggagagggtaggcaatggctaaaggtgtttataggtttttcaacaaaattaagttgcactcccttgtgttatgagacattgcttttatcccagacctctccagggttttaccatatttattttaactagagaccatcttgggaaacagtttgaaccccaagtggaatttattatttgaaagccaagtggcagggaaaacagggataacaacgaatgaaattgaaaatagagtatttcagtttaataaaattaaaaccagaacaacacctaaaatttttggctctttagtgaccaagacttggcagaactttcctcgtgagcctggatccagggggcctgtttcaagagcagggacacgcctctctttctctgcctgctcccttctgcactcttagcagtaggcctgtgggccccagcagatggaataatggaactttgcccaaaccagcgaccagaagaggttgaacaactttattcagaagcaacagagcaggctttggttctgccaatggacatcaggaagtgagctgtttgtagctatctagagaattgcctcatgtgcttgtctcttaatactatttgtggtagctgcattgtgaaacagtttaataaagctgggtaagacattggcacctagtgctattgagccctcattctttcctccactgcctttaacatgtaaatgatatccatcagatccaatcctttgatggcaatggaggaggaggaggacacacgttgcacattctccaaatatccaacagcctttctggatttctcagagtcctatggatagtaagtggcaaattcaaatataaaaatatgcttttgctttcaaatgactattaattttctgtgagttatctctaataagtgggctttcagaaagttagtataatttaatggtaatagaaattttaggccagatggggtggctcatacctgtaatcccaacactttgggaggccaaggcgggtggatcactttaggtcaggagttcaagaccagcctggccaacatggtgaaaccccgcctctactaaaaatagaaaaattagctgggcatggtggcacatgcctgtgatcccagctactcgggaggctaaggcaggagaatcacttgaacctgggaggtagaggttgcagtgagccaagatctcaccactgcattccagcctgggtgacagcaagactgtgtctcaaaaaaaaaaaaaaaagaaattttagaatatgacaagccatttctatttcaaaatttattttttctatttaaaatttagatatggtattatattttgtgataaattcagacaactttacatataatccccctgccctttgaaggaaaatgaagaaaaaggtcattgcttcaaattggagtgggacagctctgggttatgtggactttggcagattatttaacttcctcaaacctcatttttcttaatctgtgtaaggggaacagtaatacttattcgcagagtttggatgaagatttaattaaaagacctagcattaattctagaccataataagggctcaacacttcctagtttccctttaatcccagctagatcaatttctcaccaactgtaaatgtcacttttcaaaattgttattttagtatgcttaacatattaaaaacagcccatatttaagatcctaatattaagtattcctgttgaataattgtacacaattaattttactgagcgacacttttatgtcttcagttaataaaagtccatgtttagtacctgagagtcctgtgagtctctttaactgtgttacgggtagttgtgcaggatttccagaaattatgaatgtcagtggaaatttttacttctcattatttagtgcacagttctgtaagatctgtaatttagtgggtgcaggtgagagtttttagatcacaccatctgtgaaaggccttgtaaatgtgtagtggaataaaccactgttgtataactatattgccaagaaagactctgcagacatactatcttagtatgttagagtttttgaaaacttaatggcattttcagcttctgtaaggactcctgttgttcagactactaaaaaacaaaacaaaacaaaacaaaaaaacacgagttattctagcataactggcctttattgcaaattgccttattttatcttaaagagcaaatgtttggaggaataatttgtacaactccacttgtccttgggaggtaatgagctctaatacttctcagtgcttaactttggtggatagttatgcactgcctgtcggattacttactagattacttccctgatcgttagcaattcttgtcattaagtagtcaaggaaaataaaagacatgagccattctctgtgtgtacatctagacagtcatttatgcatagacacacactcatcacaaatatcccaaaagatactgctttttaaaactgattcaactagggaaactttcgttttcctttcattcattaaacaaatatgtctaagcacctcctgtgtgccaggcacagagcgtattcggtgggaagttagcacttatcccattcctgacttcttagttcctccaggtccctccacccaacaaaggccaccataatcctgatttcttttgtttcatttcagagatattctgcacatataaaggatatatttgtgtgtgtatcttctcatttttgttaatccaagtgatagcatactgtacatctcccatcttggagagtattccagatcaccctgattcattctttgtttttattactgcgtggtattacattgtatggttggatgattatcttattagcaccctgttggtggacacttaagtaattacgagggttttttctcttctgtttctgtggccttgctgtctttctcctgccttgcatttctactaacacattggtttagttatttatccataatgattctgagaaattggattcaacaccaccttcatggagacccttaaccttgtatgtacttcctgatagatccagacaagcataagtatgttaaatgtactcaacaagaccttatcttttcaccccacaaactctttgtgattagcttgtgatattgatcatgaaccacctgataagactttcaaccccagcatccacttctttaaatcgcagggaccttgaggagcacggactcagtttggcagacatcataccagtcgtctgggcctctgtcacttcaggttgcccacactgctcacactgatcggtgctctcgcagccaggacagagctcaggagtgtcctgttgttcccaggccacagtggcctccttttcctttgaatgcccttgctcttcctatgtgattttatttccactataatgtggagacatttgaagatccgttgaagcacatttacttcaaatatatcataattagctcactcccttttggtatggctctatgaagtatatctggtttcatttctggaaaccttaactgtcagaaggttgctttctcacacttggtcataaaaaataggaagccccttcccaacttaagtctttagagacttcgaggtgaccttgaccactgttgttgcttcagctgcatcttttgctgtctgttatttctgcctttcttcttgttgacattaccatgctctgcctccgaggttcagtttccctttctattgttcctctgtcttcgctctaatccccccactcttcctctctgtgtgtctgttttctgtagagcttgcttgtttcgttgactatttcagtttatgccccagcagcataatttaccattctcttttgttatttcctcaggtaggtagttgattattagctccttattctggcaataaataaaattacattttaagatgtctcagagaaatatcctctgtttcttttttaattttcaaaatatggaaatgttaaaggtcatttttaaattgtgttctttttttccccactgtttacaaaatttccaaggctcaacctctaaattatttatttttctcattgatcactctattaccactttaaaaattcaacaaatatttagtaaatctctgtcacgtactggacactgtaggccctgaagacacagaccaactccctgtcctctaggaattctagggaagccaggcagtatatgtgatactttatctattaatttttattttttgagatggagtctcgctctgtcacccaggctgcagtgcagtggcgctatttcggctcactgcaaactcccgggttcacgccattctccttcctcagcctcccgagtagctgggactacaggcgcccaccaccacgcccagctaatttttttgtatttttagtagagacggggtttcaccatgttagccaggatggtctcgatctgctgaccttgtcatccacctgtctcggcctcccaaagtgctgggattacaggcgtgagccaccgtgcccggcctatatgtgatactttattcatttattcattcattaattcattggagatgtagtctcactgtgttgcccaggctggagtacagtggcatgatctcagctcactgcaacctccacctcccaggtttaagcagttcccctgcctcagcctcccaagtagctgggattacaggcacttgccaccacactcggctaatttttgtatttttagtagaaacggtttcaccatgttgaccaggctggtctcaaactcctgacctcaagtgatctgcctgccttagcctcccaaagtgctgggattacaggcatatgccaccatgcctggccataaatggagcatatgttctagagaaaatgaaacaggaagagggagcagggagttcacaatgggatatagttttaaataaggtcatcagaggagatgctcgttgagaagaagccatttgtgcaaaaccttgaaggaaacgatgcagcaagtactggggatttactgagggaagagtgtcttgggtgggcgggagtagccaatgctcctcccagccaggagcctcctctcaggaggtgcatgcccagaacagcaaagaggccaccatggctggagtggagcaagtagaggaaatatgtcaaagaggctcctgagaacctttttaagcatgaggccttttaagccattgcagggattttggctttactctgagatgaagagccattggacagatttgagatgaggaagtcatagatcttgtgctatgatgtgttattgtcacatattctttcaagagggtgaattactaagcctttgttctagctcatcttgcggtaaatattttctgcccagttaggaggaagaactagtgataaatgacccaatattttctcttctcttccttccacaccccagatctgttgtgtaaatgcaaagaacattattactgttaatgtaattatttattaagccacatctctaagtaaccaaaagccatcaataattttaggctttctgcaaagtctctcaatcctgatttaaagtgtttatttatgacttattttggtacttcttccaaaaaaaaaaagatgagaaggtgaggtttaaaatgaaaaacatttaaatttaaaggctatgaaaataaaacttaaaaattaaaattatgtaggaagaagtagcaatccatacagatgactattgtcaagtgatttaccactcaatttacccataagcggaattcacggtaaccaaactcagaaggaaaacaacaaataacataattatctttgtctgatttttccagacaatagcactcactagtccttgtacttcttactctcgtgcaggctatcctgtgaacttatgtttcataatgtcctttttctttgcaaaacaattactttctaaaaataaactggtcaatataaatttcaccttatttctactaggttgcttgtttatttaggcggtgtcatttctgctgaaagaatcaacttcctgctaaaattgttaattcactcactgtaggcattaaaatcaaggttgacgggccgggcgcggtggctcatgcctgtaatcccagcactttgggaggccgaggcgggcagatcacctgaggtcgggagttcgagaccagcctgaccaacatggagaaaccctgtctctactaaaaatacaaaattagctgggtgtggtggcacatgcctgtaatcccagttacttgggaggttgaggcaggagaatcacttgaacccaggaggcagaggttgctgtgagccgagatcgcaccattgcactcacctaagcaataagagcaaaactccgtctcaaaaaaaaaaaagaaaaaagaaaatcaaggttgatgttacattttcttttcttttttttttgagacggagtctcgctcagactgttgcccaggctggagtatagtggtgcgatctcggctcactacaacctctgcctccagggttcaagtgattctcctgcctcagcctcgccagtagctgagattacaggcatctgccaccatgcctggctaattttttttttgtatttttagtagagacagagtttcatcacgtggccaggttggtttcaagctcctgacctcaagtgatccgcccatctcagcctcccaaagtgctaggattatagacgtgagcccccgtgcccagctgattttacattttcaattgtctgtttcactagattgtctgctacctaccttgtatcctctaacagatagtgttcagtcccctacccccaactctaaaatctaaaaaactctgaaaacagaagtttatgaaaagttgttacaaactcattcagaagcaaaaacttgaactgaaataaagacaatttaaaaatcttcatttgtccaacttgcgaatatttgcatgttttgctacagaagtggtaataggttcaattatgggtgccctgcagattccgctgggagttatgtaacatttagtacacgcatcttactacttttccaaaatttgaaaatataaattccaaaccacatcttcctccaaaaatttcagaaaagggattgtggacttggcaatagccaatcctgggataatgattggaataatgtaggtgcctagtaaatgtgaattgaagtttgattaatatgagatacttagaaattagaaacatttctgcagccaggtcttgtgaccttgagacctcagagaataaaatagataattcagtctttagaagcaggacaccaaaatgtttccttaattgttctcttaaggtagtagtaattgatcttaggtcaggctaataaatccagaaagaatgaagtgttaccctatcagtcaaaattgttcctattagtatcctagaaggtgctttttatgccattcacatattttgcatgttgtctctgtatctgtacttatcactttgtatctttctgttttttgttcaacattttttaaaggtgtcacatcagcttttttaatactggtgatttaattgcaaaagcacacataaacagtttgaaaggtgtgagaagaaattcgtaagtcacatggggaaacagcaacaaagctagcattcagtctggaatgcatccactgtgcaaaacaaattcaactgccagtgggtcaaatggtgtatcctgagattgagtgaaaaatgagtttgatacaagaagcgcttgttttatacaaaggatacagtgggaaatatcaagatgagatgaatataggctgtaccctcacaaagctgaagcttaatagggaaagcagaacatgtatataaaataataaactacatagcagaacataccagacatcatgtgaagatgagtggggataggttaaatggagaggatggacttgcagaatacatggatgagaaggacggaattttcgctgtcaagcagtgttgactagtagagatacacataaacacataaattattatggaaaatggtaaataacataataggagctaaggaaccatagataagtatagaaatccttggggaaggtaggcaggaattgatcttcaagctggtcttgagggacacaagattttgcccagaaggcttggaggtaggtcaaggaatctgttctgggcagagtaaataagatgcttgttgtttgaagtatcactaacagaacagttacatacagtaactctttatattttattgtcattgcaggtgaatcaaacatcccttctggaacaatacagagtaggaaaggtttgcagaataagagtcagtttaggaccattgcaccaaaaattgtgcccaaagtcctaacgtccagaatgctgccatgtcattcaccatcacgctctgatcaggtgaatctgggaccctccatcaactccaagctgctggggatgtccacccagaactatgccctgatgcaggttgctggccaggaggggacattttctcttgttgctctgccacatgttgcctcagctcagccaattcagaaacccagaatgtccctacctgaaaacctgaaacttcctattcctagatatcaaccccctagaaatagcaaagcatcaagaaagaaacccatcctgatctttcctaagagtggctgtagcaaagctcctgcccaaacccaaatgtgtcctcagatgtccccttccccacctcaccaccctgaactcctgtacaaacccagtccatttgaggaagtaccatcactagagcaagccccagccagcattagcacagctgcgctgaccaatggaagtgaccatggggacttgagaccaccagtgaccaacacccatggcagtctgaaccctcctgctaccccagcatcatccacaccagaggagcctgccaagcaggacctcacagctctttcagggaaagcacactttgtaagcaagataacatctagtaaaccttctgctgttgccagtgaaaaatttaaagaacaagttgatcttgcaaaaaccatgaccaatttatcaccaaccattcttggcaatgcagttcagttgatctcttcagtccccaaagggaaactgccaatcccaccctactcaagaatgaagacaatggaggtttacaaaatcaaatcagatgctaacattgcaggtttttctttaccaggacctaaggccgactgtgataagataccctccaccacagaaggctttaatgcagccaccaaggtggcaagcaggctacctgttccacaagtgtcacagcagagtgcctgtgaaagtgccttttgtccacccaccaaacttgatcttaaccacaaaacaaaactgaacagtggagcagcaaagagaaaaggaagaaaacggaaggtaccagatgaaattttggcatttcagggaaaaaggaggaaatatatcattaataagtgtagagatggtaaagaaagagtaaaaaatgatccccaagaattcagagaccaaaagctggggaccctgaaaaaataccgtagcattatgcccaaacctatcatggtcatacccactttggcctccctggcttctccaactacactacagtcccagatgcttgggggcctaggacaggatgttttgttaaataattcactcactcctaaatatcttggctgtaagcaagacaacagctcttcccctaagcccagctccgtgttcagaaatggattctctggcattaagaagccttggcacagatgtcacgtctgcaaccaccacttccagttcaaacagcaccttcgagaccacatgaatacacacaccaacagacgcccttacagttgtcggatttgtcgcaagtcctatgtacgtcctggcagcctgagcacacacatgaaacttcatcatggtgagaaccgtctgaagaaactcatgtgttgtgagttttgtgcaaaagtgtttggccacatccgagtctattttggccatctgaaagaagtgcatagggttgtgatcagcactgagcctgcgcccagtgaactgcagccaggagacataccaaagaacagagacatgagtgtgcgaggcatggagggatcattggagaggtgagtgccaatgtaatggagacctggcaagagagtctgttttgatttggggaagaggggaagatttcatattcagaaaggagagtttataaaacatctctaggattaagatttcataaagtagctatgtatacctcctagatctgtgaagaatgatcttgtttctctctggtttctgatcatccatacttggaattaccctaaccaatctagtaaagtactgtatatagttccagtggtctttacaagtaatttcccccaaaatcacatccacagaatttgcgttattttaaacagcatcatttgccccaaaatgcggcatgacccatggttggggactcagagtgggtgggtctgtcatgttgaccctaccttaaggtgcccagaccccaccctcttcatttgccctgtttttcccatcagttcgggttcactctttctggtgtcattcctttttgcaagcactgcttcctggtattattgctatgggatccttggggtgtcatttcaccagccggaaacctctgtggccagtggcgccttggcctgagttttgctctggcccattaggctcgttccacccacttggaacctagcaggctgcactcagctcatgctaccggcctagatcccatgcctgccaagggcgagccaggcacagagtggtgagggatgtgtgagtgagcgtggggtctggccactgcgcataggcaggcacgccggctgctgctgcaggccaggcagctccaggtgccacctccttgcaaggctgtggctggaccaggcacatcacaagcagcttccacggttggcaccaggaacatgatgttgcccagaagcttggagactagggagtcactgccctggctcagggggctcccaggacagagctccccaaagggccgcagctcttctcttcacctgctgtgtggcaagcaagaggcgtgtttcagcctgtttgtgttacagctctcttagccccaccatttggcaggtctcaagttcttgtcctgcgttcaggaagaatgaggtacacagagaagtagagggtgagcaagatgaagaggagctttattgagtgatagaacagctcagagttgaactgcagggggcagttcctctctgcaggcaggttttccccgtcatctcttgtgctctcagcagagagggtagctcctctctgccactggtcgtcccattgtctcttcaagtctggctaagtccggggcttttatgtgcctcagaggagaggaaatgcgtgcagttggtccatgggcagtcatggacagacccagaaaagcaccacaagttcccactccagtccacatgactggcaacctggcccccaggcttcagggcttctctggcttgaaggtggggcttcaccggggacctccccttttctgcccaggagcttctttgctccctgcttctgtttatggcacccaggctgttcatgctgagggggcacctgcaggctggcaccgagctgtcctgagcaccccttcctcagcctcccttccatgcttattggcacccaaagtctggagcaggccaatggggtaggaggtgggcatatcagcactgcctcaagcgtgtgcacacccaaccaggttacagcagagcccaggctcagccccagccttgctttgagattggagcaggtgctgacagcagggagaagccaggcagcaggagcaggtgcttcttgagcccgtggggggaaaggggccttcctggacccctgagagtgcagagatgcctggatctgcagccacagcagggtagctacagtgatgcctgggagggcaggagcgctcctgcctgctcccagcttccaagagcacaggggtgcctgggtcacagctgcagcttgggcagctgcaggcagttgtgcctggtaagctcccacaccgtcaacttggaaagggcagggctcgtgcttgtccccagctcccactggctccatgaagtgtggcaccacccctggcccagctctgcctcagggcccctctctacccactcctgcatgccctagtgtgctgttttcccctgccagcaggtgactcagcctggccccatcgcagtggctctcatggcggcaggtttcagggactgcccacctcctctccatgttttcccagcagcaacagcaggcaaggtgcaggtggtgcagtggccctggccaaccctgcacaaatgaacctgacactctcaggactagccccacaagtcccggctgcaccttcagctgggtgctcactggctcctttctgaatatgaaatcttctcctcttccccaaatgaaaacagacgctcttgccaaatgtagtttggacattgtacctaaaaatcaaaatctaactctaggaaaagaaggaagaagtgaggtttcatggttcattagtgaaaggcacagaggtcttaaaggggacagaaatgtctaagaaaaaggagaaactctagaaaagcaaggaagaaatagggtaggcaccctttatttttactgaacatgacagagtgagccaaaattgaatagaaggtattggtgctcaaggttagggagagccacagtgggtagggtgggaccgttaccttcaacagaaccgagggtgttcccgtgcccttcacgcgctcttacgtgactcttccacgtgattgctcctgtccctgtggtaaccaaagacgagttagctcgcctgggacagatgcgtgaagaggactgttgactaaatgaaccctggtagctggagaaatgtgtggccacaagcaggagtgacaattagtattcaccacggtccttgcagaaggtcttcccaggtgctctctgtttaccccagcccttgtctttctcgtcagtgttatgttttagatccctgaaggctgacagctgagaggaaagattccaattgcatttttccatgaaatcttatcttcattattattggccttttcagggaaaacaagtccaacctggaagaagacttccttctaaaccaggcagacgaagtcaaattacaaatcaaatgtggtcgttgtcagattactgctcagtcttttgcggaaataaaatttcatttacttgatgttcatggagaggaaattgagggcaggctacaagaagggaccttcccaggaagcaaggggactcaggaagagttggtgcagcacgctagccccgactggaaaaggcatcctgagagagggaagccggagaaggttcattcctcctccgaggaatcacatgcatgtccaagactgaaaaggcagctccaccttcatcagaatggcgtggaaatgctcatggaaaatgaaggaccccagtcaggaaccaacaagccaagggaaacctgccagggccctgagtgtcctggcctccacacgtttctcttgtggtcccattcaggctttaactgcctgctttgtgcagagatgctgggacggaaagaggacctcctccaccactggaagcaccagcataactgtgaggacccttccaaactgtgggctattttaaatacggtctccaaccagggagtgatcgaactttccagtgaagctgagaaatgagaccccaaggcagcctggggttaaggagagagctctgccgccaccttccttcagagcttcgtgctttatggtggtgcttagtcacaaagatcaaacaacaggattggtgtgagtgaacagaaatgatttttgtacatggttttattttcttaacgaaataaaatataagctctcgaagcatatttttctaactatatgcagtcttattttaaaatacgtactgattcttaatatcttagactttcagaataaataaaaagatcaaaatttgaagattgaaatttagcagaatataggctgttcttcaaatacagctctcagtgaaaacatgcatgtgtccttccttttgttcagatgttttctgcttatatagattgacaaatgtcaaaaatgtccaggcagcaaaacccttttaatctcaaccatagtatcaagttagatggtaaatgctgatatttattaaattctctggtttatttgaatatgatatagagcagtattttaataagattgtcatctacaataatttaaaatccatgttttcaggactcagatttttgtttcttgtaattttgctattttcttaaatgcacatttcattgaagattagttgttggcaagtcttatagctgtagtgttccatatcaaaataattttttaaaaaatttagtacttcagctaataaaaagtctacttgcttggtaaaaagttattttcaagtagtctttgggaccagaaaatttacaacctggaaaatgaactagatagttcagtccagatgtgtaggggtctcaactgctttccctcactcccaagtaacttcagagggttgtcgctagctgatcaattttagatggaactgtacttttcaagcccagttctctttgaaagtcagaagtaaatgattgcctcttaaattcctgggaaattacctcgaatcagtaaagttgtcatttgaagcttctggccatcctggctgcaaaatcattttcttagaaaagtggagtttcagcactcatcctactgataatctcagtcttggatgaaagcaccatacgtgtggccagccctgtttgctgaaactcagcccaggtatggtcataatattttgtgctcaaggaagttacctaaacagagaaagaactaaattctaattgataagctgatggatcttacatctttttttaatgtctgattttaaaagccagtgtttgtagacatgatttgcctcaaatagtacaagagaaaacttaatctttgtctttttgcaaatagttttgtaaatttgggaataagagagtagggatagaaatatctgaaagattgtgttgtggtttgtctgttgatcacgctttacccagtttcaaatagggaatatcagacctccactgtttgatagttttagaacttcttggttaataatgaagtcgctttaccattcaaaccagttcccagtttgttttttgaaatattggtctcaaagacattaccaaatgacttctacaaagaatactacttgaattcaaaccatgaaacttgaattcaaactatgaaataattcatagactgctcaatcctcagatgctaagtcgtattttagaaacactggccggttggccaaagcagagtggagtgtgtggagacaaaggtgtgggacagaatacacccacccagcactcggggaaagtctcaagtcccctagattgtgcaggagcccacctgtggcctttatttccccacatattcttacagcaaggccataggcagtctccagaaaggagtacagtgaggaatggggaaaagagcaaaggtatggagaagatatgattggctcatgattcagcactctggctggatccccatttcagagcagctgcatttccgagcatttcagagcagcagctccaatgtactaactaaatttagatgactcaacagagcactgatccatagggagagggagggcgcaggtggggagccatgaaaaagtgacactcatctttaagaaaattctttttgtttttttggagtgctgctcaggctggagtgcagtggcacgatctcggctcactgcaagctccacctgccgggttcacgccattctcctgcctcagcctcccgagtagctgggactacaggcacccgccaccatgcccggctaatttcctttttgtgtgtgtgtgtgtgtgtatttttagtagagacggggtttcaccatgttatccaggatggtctcgatctcctgacctcgtgatctgcccgtctcggcctcccaaagtgctgggattacaggcgtgagccactgcacccagccgaaaattctttttttaagataaggaaggttagtggggcataggaccctccccggatgtcagtgtgtatgggttcatttgtggtacagtgttacagttctcagcttttgaaaactcccctgccttacaatgcagacagccccagtgccacccaaaataaggagtttctggcccttactggtagtgcttcattgagaatggtgggaagagggcctcctactggggaggcaggaagatgagagagagtatttagctaaagttactttgggaacagctcagagcctttcttgggtgtggagatgttactggaacagtcccaacctgtatacttaggccagaggtggtgtggtgtgcaacaaagtgctccaatacttactgtgtgtggcctcgagagagtgtcccctcttaggctccattctctcctctgtgaaatgggggtgacaatcctatgtcaaggcactgttgtgaagagtaaaagagacacacacgaaatgcctggcacctgtgggccatgtgataactggtggctggtatttattaggcttttggccagacttgggagaagaggtattttgtaccatataaaagattgtaaaaagcttgagtagacagatcttaagtgccgaattcaaggatggaaactactaggaaccacagaagttggcatttttgcaggaaatgcattttatttttattttatatatttttttcgagttggagtcttgctctgtcatccaggctggagtgcagtggcatgatcttggctcactgcaacctccgcttcccgggttcaaacaattctcctgcctcagcctcccgagcagctgggattacaggcatgcgccaccacacctggctattttttttttttttttttttttagtagagatggggtttcaccatgttgggcaggctggtctcgaactcctgacctcatgatcttcctgtcttggccttccaaagtgctgggattacaggcgtgaggcaccgcacctggccatgaaatgcattttaatttttaaataaaaactagggtttggattgcatggaggtttggtaagtgtctattcaatcagaatagaaagcaacattcactaaattatttccatgccaggtttcactttggggcctgtattccttaggtctcagcccatgcagcacctcattcctgcggttgtccctctgcccttcccttgcccctgttatagctgtcatcatagcacccaccttgctgtccagaagctgagggtggacttgtccatctctcacactagataatgagcctcatgagggcaggaactgtgcctgtgaacagaggttcagcacagagccctagagggtccagtggctgacatggaatagtgcacagcagatgtttgttgaaaaaaaaaaaaaaaggatacatcagctaaataaaagcaaagttaacactttttatgaataaaccagccttagaagaaaccaaacttgtagctagaaaggcatggaggcaaacttggtcttaaattcagcacattcattttgcttcatgtcttttgcttcttggaaaattgtcccaacgccagcaaaactagatttttttcctcttcttttggccctaaattatttctgaaagttacagcatttttagatttgtattgttttattacctgtcatttttattcacgtccgcttttgttgctctctctctctctcactggacctcttcctagtttaacttgactattcctctgttaagctgttcctcatatggaaagttgcctcttcatcagcacaccataaataatccaacctgggtgcgttccactgccttctctggctacagactcctcccctccccagctgtgcggctccagttgtctgtggccccagtgacatggttgttggcagtaaatgttcaacttcatttatttcctagaattctcagatctggactggtttgctccattcaagctgctgacaagctttgttaggtacatattttatagcatctccccttttcactgggctcctgagaaaaagtgtcctggtgagtatgacctggaatttagcagaacaggtttttagcttcaactttattctgacttctctgacgttggacaatcagaagcttatctaggcttgtggtttaacctaatgtatatttaaacaatatccacctcttcaggaatattacttctagaggtgaactgtttattgtgtcttatatttggtcacggtcatggttattcctataataaaactatagccacaattttgggggcacattttaaatttgtgtttagtatgcagacgttggcttaggaatacatcacattttccatgctctgaagtgtgaatatatttcaatgcattgctcaactgtaggaatgccacccattgaaggaaaccaaatgtgacaactaaaaggtgtacagattattccttcttattttaatgtgaagctaaattttctttttcaattacatttgctcctatcttcagaattgccccacccccttagcttaagaagaaacaataggatggcaattcttgccattttaagtatgttccaaaaacaaaatctcaaaattattagaattataatagatcatattttttaataaatagccactgagcactcctcaatgaaaagattgtgcctttgttcattaaatatgaatttaatctccacctaggagttgcaaagagaccaccaggcctttgcagagacaaagcaccgaatttagtctgattgctgcctgaattgtaatgcatatcttactacaaaaattcacctatggaagagatccaagtagctcaaacacatgcactgcacagccagccctagagctctggctgtctctgaaagatatttaaggtcttgtgcttaggaacctaatgtgctatcttctcccagtctaatgcaaattaaagcacagttcaggttttcataagacattcattgaaccaagcctttttgacaatggttacacccaaggaaagttattctaaaatgtccaagaaaactaagtctttcaaatggtcttttttccttctggaagtaaagggcgggcaaagagaagcaggaggacgggaataatgtgtcaagatgtggcatgaggagctttctgatgatggaaggcccaatggggcactgtaaggggaaggggggaacatgtctctagtgtccaggtgcacagtgccattaatattttgttgtaacggaaagaaatttgacagtgcttatcacaatctaaaatgcacattttgacccaggatctctatttctaagaatttgtcccatagatagtaccatacaaggacacaggtagatgagcaaggatgttcactgcagcattgtttatagttagcaaaagactagacccaactgaaatgtctatcagagctggtaaaaaacatgacagtacaccatataatggagtagcatggtgtggtcgaaaagactgaagtggcactttatgggctggaataagtattgtgtgaaggaagcaaggtacagaagaaagtataccgtgtccccatttgctgtttaaaaagggggaagaaagagggagaaaaaggatatatgtgtgctcatatatgcacagaaaatttacagaaggtgactgcactattggaatgttttgttgcattttccttaaaaacttttcctcatatttcatatatatgcttggcatagcagaatttaacattatttacaatcaaatctggcagtattttcttgcatggcctttgcatttggtaatatgcttagaaactccaatgcttactcaagtgttcataattattttcgtctagtatcattacaggttcctgtttttttttctttttttttttggcagagtgttgctgtgtctcccaggctggagcgcagtggcatgatctcggctcactccaactccagggttcaagcgattctcgtacctcagcctctcaagtagctgggactacaggcatgcgccaccacgcccggctaatttttgaatttttagtagagacggggttttgccatgttggccaggctgatctcgaactcctgacctcatgtgatctgcctgccttggcattcccaaagtgctgggattacaggtgtgagccaccgcgcccagcccattatggtctcctttatatatcacagtggttagaaacatgggctttgttgtcttatggttttagatttcattcctgattctaccaactatttagctctgtaattctggcaagttccttcattttttttaaccttaagttcaggggtacatgtgcaggtttgttatttaagtaaactagtgccatggggatttgttgtacagattatttcatcacccaggtattaagcctatagtaccctttagttatttttcctgatcctctccctccttccaccctccaccccaccctccagtaaaccccagtgtgtgttgttcccctctatgtgttcatgtgctctcatcatttagctcccacttataagtgagaacacgtggtatttggttttctgttcctgtgtttgttggttcctgtgttagtatgcatggctgcatagtattccatggtatatgtataccacattttctttatccagtctaccattgatgggcattttaggttgattccatgtctttgctgttgtgactagtgctgcaatgaatgtgtgcatgtgtctctatgatagaacaatttatattcccagtgatgggatttctgggtcgaatggtagttctgtttttaggtttttgaggaataccaaactgttttccacaatggttgaactaattcacactaccaccaacaatgtataagcattcctttttctttgcaacttgccagcacctgtttttttttactttttaattatagcctttctgactggtgtgaggtggtatttcattgtggttttcatagggcattcatttgatttgcatttctctaatgatcagtggtgttaagctttttttcatgtacttactggtcacatgtatgtcttttgaaaagtgtctgttcatgtcctttgcccactctttaatggggttgtttttttcttgtaatttgtttaagtttcttagaaatgctggatattagacctttattagatgcatggtttgcagatattttctccattctgtaggttgtctgctctctgttgatggtttcttctgctgtgcagaagctctttagtttaattggatccatttgtcaacttttgcttttgttgcagttgcttttggcatctttgtcatgaaatctttgcccattcctatgtccagaatggtattgcctaggttttcttccaggatttttatagtttggggttttacatttcagtctttactccatcttgggttgatttttgtatatggtgtaagaaagaggtccagtttcaatcttcggcatgaggctagccagttatcccagcaccatttattgaatagggagtccttttcccattgcttgtttttgtcagctttgtcgaagatcagcaagttgtaggtgtgtggacttggctttaccagattaagctgaagttgtgctgttttcattagggtaggcctcagtagaattgtgaaggagggaacatctgtcctagtccctcaattgtggtgcccccgtgcattttctcacttgagtccctactgcctaatagtcccaggaagatgacgacccacaaataaaaaagatgtgtttacaacccaagacacacattaatacatacaaatactatacacagatagatacctatacaactgagacaaaaggttttattttataaaaataatacagtatacaaaataatttacattgtattttgatatgtcctgttctaattcgtttttaaaggctggataccttgcactaagttgatttcatgacccactaatgagcaaataaaatctgaaatatttggctacagacttttgactttctgacccctcccctacatcatggcctttctgggctgtcacccagtctctcagatccctgctatcagaggcttgatgaatgacgctcatctcttcccacaaacttaaatttcttagtccttttgaaggatgacctcatgccaaagggataactaatgctggaacttcagacatcccatggccgaccataaggtctctgggggatacttcaattagtgccctgggtggctcccctttgcccctttggaaaagggacattgccacccatctagggactcaccccagtaagctgccaggccttgaaatccttttcaaagttttacttgactagagttgccaactctttgggtttgggctgggtttgaaattgtctctcatttctttctttcttttttttttttttttgagatagaatctcgctctgtcgcccaggctggaatgcagtggtgggatctcagctcactgcaacctccacctcctaggttcaagcgattctcctgcatcagcctcccatgtagctaggactacaggctcttgccaccatgcccggctaattattgttttgtcttttttttagtagagatggggtttcactatgttggccagactggtctcgaactcctgacctcaggtgatctgcccgcctcggcctcccaaagtgctgggattacaggtgtgaggcaccgcgcctggcctaaattgtctctcatttcttatcctaattcaaacaaaatggtttggcagaaattaagtcctcaggagatgcaaattcaggcagcactggagccagcagccttcctctactcttcaccctctcctcctccgctttcctaggaagcccacatctgggcagtttttctgggtgtatggataggacccctcccttctcctcccccggcctcactttcctgtggaatgttcacctgctgttcaccaggcctgctgggtcacaaaggtagaacgtggtcaaaaagggctcttaggcttcaaggtaatctttgtctttccatcatctctccggaaacagattctgaaatgagtctgaaacttccattgagggaaactaacgctactgtctcctcgcaggtcagatgcccagggccactgaagagaaaactccgcttttcatttagctgtcacttggcccaaaccagtcaaaggtaacacctagttaattcacattctcccctgtggattcctccgaggtccccctttttcaattttagtgtgttggcttaaagaaagtgggtctggtttcccttttaatagcaacttaagtccatcccaagtcgccaaaagactgatggaacgactcccaggtcctccaggggtctccccaaatccacacgcaggtcccgggtgccccggtcatgtggaaaaccaggcacccagcgtgcccacctgggggtcgcaggcgtgaagagccagcctggcacagagccgggctggccttgggagggtcctcaaggcttccgggcagatggctttacctgggagctgctgctgctaagctgtacttttccatttgcacatcgatgggagaacagaatctggctcttgcaatgataataaaaggcactaggggagaaggaaattggcaggtattaacgaataattgaatgttttcattttgctttgattttcatcagtgtgctgaaatactacctcaaacgttcatcgtcttatatgggaaataataattatagtaataataattgttataactccgagggcctttattgctgaagagagcaagcttaggcaattatcacaaagaactcaaatgctttcctgggtcctgtgggattaattggggatttcagcccagtcacaattggggaaatttccacatcacaaaatccattgctataatggacactaattggcctccttgttgacagtcccagaagagaaagcccagagccctaaaactgagcgatttgctaaagggttgagacagtagataggaaatcatgctgctgcaaccttaagtttgctcttttccagggataaggagagtgtgttgggctgcagggctgtcagtgtctcaggtaattgattcagagatagcaaaaggccttctagta

SEQ ID NO: 793 - DNA, 546 bp, Homo sapiens
atggtcctgaatggaaaaagatggaagacaaaggtgaaatcaactaatggagaaactttagcaaatgtctcagttccacaacaacatctttcctgtttcgaaaatgagtctttgcaggctttgagtgaggctttggtagagcagtcgccgccgcaggcgccccggtcggcgaagcccacaggcatgcgggcgcagaggccgtctgcgcctgcgcggggtgtctgctacggggaggaaaactgtaagtttacgaggattcctgcagctcctagggcttgcggggcccgctggcagctggcagtcccggcggtggtggtggctctgggggcgtcagttccttggggagtcgccgattgtggcgaagggacaggtgtctgctcagagtggcagcgcgccctgctgggcgatcacacagtcagtatagcaaattggactgcaaagaagggaccaaaaaagtggaaaggacaccaagaaagaataatgttactgaagccaagagacaagcattttaagatcaaggatatcattattaaattgataacactt

SEQ ID NO: 794 - protein, 178 aa, Homo sapiens
MVLNGKRWKTKVKSTNGETLANVSVPQQHLSCFENESLQALSEALVEQSPPQAPRSAKPTGMRAQRPSAPRVCYGEENCKFTRIPAAPRACGARWQLAVPAVVVGASVPWGVADCGEGTGVCSEWQRALLGDHTVSIANWTAKKGPKKWKGHQERIMLLKPRDKHFKIKDIIIKLITL

SEQ ID NO: 795 - DNA, 981 bp, Homo sapiens
atgacttggagtggagaggccctgcaggttggagaagttcagtgtggctcaccatggagtgtcagagtgagggagatgactgctgagctccgagaggtgaacagagcccctgttaatagctctcatactcactggtttgtggaaactgagcatttcccctttatccagaggcagttgtgtgctccagtagaggggcatagcccagtgactgcaagccccgtgagggtctcacagagtaggagaggctttctccaaaggaaccagaagaaaaatgggaatgtgtgcttagcagaccaaaactgtcctgacttcaaaccattaaaaatgaagcagagctcgggaaagaaattgaagaagaaaatgaaactgtcaaatgaaaacaacattggaaggagtacaagagaaaaagatgatacaggaaaaacagtgaggtcatggaaattagacatgagagagtcaggttttgaagtgttcgcattttttttctactgtatctttgcctccttgtccatctatggctataggaagctcatcctgggagtggaggaacagatgttctgtcattgccacattcttctggacacagactggagaactataggaatggcactagaggacacacacattaatacttcccaggtgctgggtcagcggcttcctctcccacctggtgctcaggccaggtgttggaaagatactattcaagtccagtacatcataatgcagaattctgtatcagtaccaccaaaagatgaagcagtaggcctgtgggccccagcagatggaataatggaactttgcccaaaccagcgaccagaagaggttgaacaactttattcagaagcaacagagcaggctttggttctgccaatggacatcaggaaatccaatcctttgatggcaatggaggaggaggaggacacacgttgcacattctccaaatatccaacagcctttctggatttctcagagtcctatgga

SEQ ID NO: 796 - protein, 323 aa, Homo sapiens
MTWSGEALQVGEVQCGSPWSVRVREMTAELREVNRAPVNSSHTHWFVETEHFPFIQRQLCAPVEGHSPVTDVRVSQSRRGFLQRNQKKNGNVCLADQNCPDFKPLKMKQSSGKKLKKKMKLSNENNIGRSTREKDDTGKTVRSWKLDMRESGFEVFAFFFYCIFASLSIYGYRKLILGVEEQMFCHCHILLDTDWRTIGMALEDTHINTSQVLGQRLPLPPGAQARCWKDTIQVQYIIMQNSVSVPPKDEAVGLWAPADGIMELCPNQRPEEVEQKEATEQALVLPMDIRKSNPLMAMEEEEDTRCTFSKYPTAFLDFSESYG

SEQ ID NO: 797 - DNA, 3517 bp, Homo sapiens
ggcgagggcggagcctgggggcccagcggcccgcgccccgtggcttgacctccccgactgctgggcccgtgacgtcaccccgctgtgacgcgcacgctgtaggaaaactgctggagtatagtggcatgatctcagctcactgcaggctctacctcactgcaggcttaagcagtcctcccacctcagcctcctgagtagctggaactacagaattaattaaaaggatttacggtatatcttatgactctacaggagccttgggatatagataaaaatgaatgccatttcccatccagtactgaagtgttaaagttagaagacatttgctaagtcaaatcacttcagtcaggttttgaagtgttcgcattttttttctactgtatctttgcctccttgtccatctatggctataggaagctcatcctgggagtggaggaacagatgttctgtcattgccacattcttctggacacagactggagaactataggaatgtatgttgaagaaagtacgcacatcttatcttctgaacattttgatggaattaaccacaaacttcatgcaagaacagtaaaaggaaagatactattcaagtccagtacatcataatgcagaattctgtatcagtaccaccaaaagatgaagatccaatcctttgatggcaatggaggaggaggaggacacacgttgcacattctccaaatatccaacagcctttctggatttctcagagtcctatggatagtgaatcaaacatcccttctggaacaatacagagtaggaaaggtttgcagaataagagtcagtttaggaccattgcaccaaaaattgtgcccaaagtcctaacgtccagaatgctgccatgtcattcaccatcacgctctgatcaggtgaatctgggaccctccatcaactccaagctgctggggatgtccacccagaactatgccctgatgcaggttgctggccaggaggggacattttctcttgttgctctgccacatgttgcctcagctcagccaattcagaaacccagaatgtccctacctgaaaacctgaaacttcctattcctagatatcaaccccctagaaatagcaaagcatcaagaaagaaacccatcctgatctttcctaagagtggctgtagcaaagctcctgcccaaacccaaatgtgtcctcagatgtccccttccccacctcaccaccctgaactcctgtacaaacccagtccatttgaggaagtaccatcactagagcaagccccagccagcattagcacagctgcgctgaccaatggaagtgaccatggggacttgagaccaccagtgaccaacacccatggcagtctgaaccctcctgctaccccagcatcatccacaccagaggagcctgccaagcaggacctcacagctctttcagggaaagcacactttgtaagcaagataacatctagtaaaccttctgctgttgccagtgaaaaatttaaagaacaagttgatcttgcaaaaaccatgaccaatttatcaccaaccattcttggcaatgcagttcagttgatctcttcagtccccaaagggaaactgccaatcccaccctactcaagaatgaagacaatggaggtttacaaaatcaaatcagatgctaacattgcaggtttttctttaccaggacctaaggccgactgtgataagataccctccaccacagaaggctttaatgcagccaccaaggtggcaagcaggctacctgttccacaagtgtcacagcagagtgcctgtgaaagtgccttttgtccacccaccaaacttgatcttaaccacaaaacaaaactgaacagtggagcagcaaagagaaaaggaagaaaacggaaggtaccagatgaaattttggcatttcagggaaaaaggaggaaatatatcattaataagtgtagagatggtaaagaaagagtaaaaaatgatccccaagaattcagagaccaaaagctggggaccctgaaaaaataccgtagcattatgcccaaacctatcatggtcatacccactttggcctccctggcttctccaactacactacagtcccagatgcttgggggcctaggacaggatgttttgttaaataattcactcactcctaaatatcttggctgtaagcaagacaacagctcttcccctaagcccagctccgtgttcagaaatggattctctggcattaagaagccttggcacagatgtcacgtctgcaaccaccacttccagttcaaacagcaccttcgagaccacatgaatacacacaccaacagacgcccttacagttgtcggatttgtcgcaagtcctatgtacgtcctggcagcctgagcacacacatgaaacttcatcatggtgagaaccgtctgaagaaactcatgtgttgtgagttttgtgcaaaagtgtttggccacatccgagtctattttggccatctgaaagaagtgcatagggttgtgatcagcactgagcctgcgcccagtgaactgcagccaggagacataccaaagaacagagacatgagtgtgcgaggcatggagggatcattggagagggaaaacaagtccaacctggaagaagacttccttctaaaccaggcagacgaagtcaaattacaaatcaaatgtggtcgttgtcagattactgctcagtcttttgcggaaataaaatttcatttacttgatgttcatggagaggaaattgagggcaggctacaagaagggaccttcccaggaagcaaggggactcaggaagagttggtgcagcacgctagccccgactggaaaaggcatcctgagagagggaagccggagaaggttcattcctcctccgaggaatcacatgcatgtccaagactgaaaaggcagctccaccttcatcagaatggcgtggaaatgctcatggaaaatgaaggaccccagtcaggaaccaacaagccaagggaaacctgccagggccctgagtgtcctggcctccacacgtttctcttgtggtcccattcaggctttaactgcctgctttgtgcagagatgctgggacggaaagaggacctcctccaccactggaagcaccagcataactgtgaggacccttccaaactgtgggctattttaaatacggtctccaaccagggagtgatcgaactttccagtgaagctgagaaatgagaccccaaggcagcctggggttaaggagagagctctgccgccaccttccttcagagcttcgtgctttatggtggtgcttagtcacaaagatcaaacaacaggattggtgtgagtgaacagaaatgatttttgtacatggttttattttcttaacgaaataaaatataagctctcgaagcatatttttctaactatatgcagtcttattttaaaatacgtactgattcttaatatcttagactttcagaataaataaaaagatcaaaatttgaagattgaaatttagcagaatataggctgttcttcaaatacagctctcagtg

SEQ ID NO: 798 - protein, 812 aa, Homo sapiens
MDSESNIPSGTIQSRKGLQNKSQFRTIAPKIVPKVLTSRMLPCHSPSRSDQVNLGPSINSKLLGMSTQNYALMQVAGQEGTFSLVPHVASAQPIQKPRMSLPENLKLPIPRYQPPRNSKASRKKPILIFPKSGCSKAPAQTQMCPQMSPSPPHHPELLYKPSPFEEVPSLEQAPASISTAALTNGSDHGDLRPPVTNTHGSLNPPATPASSTPEEPAKQDLTALSGKAHFVSKITSSKPSAVASEKFKEQVDLAKTMTNLSPTILGNAVQLISSVPKGKLPIPPYSRMKTMEVYKIKSDANIAGFSLPGPKADCDKIPSTTEGFNAATKVASRLPVPQVSQQSACESAFCPPTKLDLNHKTKLNSGAAKRKGRKRKVPDEILAFQGKRRKYIINKCRDGKERVKNDPQEFRDQKLGTLKKYRSIMPKPIMVIPTLASLDTTLQSQMLGGLGQDVLLNNSLTPKYLGCKQDNSSSPKPSSVFRNGFSGIKKPWHRCHVCNHHFQFKQHLRDHMNTHTNRRPYSCRICRKSYVRPGSLSTHMKLHHGENRLKKLMCCEFCAKVFGHIRVYFGHLKEVHRVVISTEPAPSELQPGDIPKNRDMSVRGMEGSLERENKSNLEEDFLLNQADEVKLQIKCGRCQITAQSFAEIKFHLLDVHGEEIEGRLQEGTFPGSKGTQEELVQHDDWKRHPERGKPEKVHSSSEESHACPRLKRQLHLHQNGVEMLMENEGPQSGTNKPRETCQGPECPGLHTFLLWSHSGFNCLLCAEMLGRKEDLLHHWKHQHNCEDPSKLWAILNTVSNQGVIELSSEAEK

SEQ ID NO: 799 - DNA, 70787 bp, Mus musculus
  misc_feature (1)...(70787): n = A, C, G or T/U
atgccgtagagcagtagtagcaaacctgtaaggtataaaattagacatgctgtagactgaggagatgctctgggcaataaagtgcttgccacacgggcatgaggacccgagttcaggccccagcacttactgaaaagccatcttataatggcatgggctggtaatcttcgcattcaggagaaagaggcatgttaacccctgaagctcactggacagccacatcaacaagcccaaggtacagtgaggtccaagacggtagcagagtgttagcagctttattcttctaaagactggacagtgaacagtggtgtggaaacagggatcacggaacaggccctgcccacagaagcactcaactaacactgggtagatgaatgaatgagtgagcgaattaatgaatcaagttggtagttcattgaagaagcaggcatacatgctggtagactaagtggagaggacaaagctgtaacaagagcaaagggtaggctctgggatgggacgaatagtaagtgccgcatgtctctggcaccttgcttcttggtcacataaggccttcccaccataatctcagactttccccatagaatcagggagagccacaggagggcaggaaggagaggatggctttaggacactgtgctaagagttttcattaagccccatccccctgcatcctagcagggtatgcctttaaagggttaagtaactgctgtctccgcgagcaagtatactgcaaaactaggatagaaatctgggcctggcaactaaatcagggctgctttcatccagaactatccatccactgttctcaaccatcaagcacccccaccctaaagagggttagtgacccagcctggctgcgcagctaattagtttggtttccacggcagcggtgtttaactgagactgtgaggatcctcctacctctgccagcacagctgaaacagtaagaggaagacggacaaggaattcttggcactgggggactcagagtcttgacagggacacatggtcactaaaacccagctttcttagggtcagagacccataggcttcatagtggcaaccttctacttctgtcttagcctagagaagtgtaagccacaaagacccctcctctcctcattagatcatggaggttcaggggacaatggacatcgaacactggaaggtctcctctgtactggaagcagcagtggacttggtctgggcctgtcatggaacctctgaccagtccagagcccaggctcaagggaagaaagcttccttctagccctttaggtgaaagggcaatagattttatacgtaaattccaagcaaaggtagaggagaaggctcagagaaggaagaagaaaaggagaggggnnnnnnnnnnnnnnnnnnnnnnnnnnnnnnnnnnnnnnnnnnnnnnnnnnnnnnnnnnnnnnnnnnnnnnnnnnnnnnnnnnnnnnnnnnnnnnnnnnnnnnnnnnnnnnnnnnnnnnnnnnnnnnnnnnnnnnnnnnnnnnnnnnnnnnnnnnnnnnnnnnnnnnnnnnnnnnnnnnnnnnnnnnnnnnnnnnnnnnnnnngaggaggaggaggaggaggaggaggaggaggaggaggaggaggaagataagcagatggaaggagtgtgggtagcacaagtcacctaccaaccgaacagcctcccagtgctgcctgctgttgctggctggacactgtagagcagagaagcctgttgcatagcaactgccgggcagcctgcttgtagggctggaccaaagaggaagtgtaggctgcaaagggggctgcttggactaagagatctgcattccacacataatcttagttcctttgccagatttgacctgaggcgaggggtcacttgggaaccaagaagtacatctgtgccttgggataattaatccatttgtctagcactttcctggaatcagctctgaactccttcctaccttcccacagaattagatggggctggataccagagaacagtggcccatcttgctctaagcatctgtctggcatcatgcaggcctctttgagctcattccactccatgcacttgctagaatatgtcctggtgggaatttgtcttgtctcaaacaagcaggcaccacccaacccatagcagcgcccaggccctgccaggcttagcaggcacagcctgcctatccctcttctcagtgactctcctcacagtcagtttgtgagtgtccttccttccctttgttattcctgtaaattcccccacttgctctctaactctaatcccacccaccctgaaagtttaggtttcaggaaagaacaaaggatctcatgtccactatgtggtcacagaaatttctggagcgtggagtgacttacttgccacagttcacacttgtcctgcccaggtgcccagctcccaccacatgcctgacttccaggtcctctctcacaaccaggaggcccattctgatgataggatccagccattcccccctccccctgccccaggcaattagaagttctactgtggtccttgacacccaacaccattgacagtgcagagcaacgcatcccaagtcagcgatgctcagtgcaaccagtgtgagggtcaaagagatgtcttgtcagcagtttttgccatgcaagccctcagacctgagattgattcccagtgctcacataaaatgccaggctcacggaagtgcacttgtaatcccggcactgggggtggggggtaagcaagagcaagaggattccagggcttactggtcaacctgtctatcatcatcactgaattccaggttcagtgagaaaccttgtctcaagcaatgcaagaaggcatcctatattgatctccggcaactctacaccacgctcacctacacacactacacgtaatgtgatcacaggtataatcaagtggactcaatcatggaaggcttgcaagaagtggaggcaacgccttaggatttgctttgtaataaagagaagtagtaggaggtgagggaaggaggggcttgcacaacagaacagcgtctctcagagcgacccggaggctacctcaagccctttgcccaagcaatgtactaggggccttagttggctggtcaaatgaagagaggagtaaaagggggcaaagatcttgacagggctgatgtatctcgactggacaaccgtcagatggcctctttggatcaggaagggaggacagaagtaagatttatttttaaaatatcttgtctggagggcttgcatttcaatgggccctagatttgcatattttaacattaaccctgttcttctgtctggtcatactgctggctgtctctctaaaggacgatcactgcttcaataaacccttcctaatccgaaggtacaacagggctgctcagctggagggcagaggattaacagggtctttctctttggtctggaaacaagtctgaagggcgggtgacccacttgcagcctctgggcacttctgccaggcccaggaactaggctggtgatcccacttggtcatccatatgatgagtacgttaagtctttgtgtgtgtgtgtgtgtgtgtgtgtgtgcacgtgcgcgtgcgtgtgtgtcttcaacttcaggtttcattccacagaacactgtctaccttagttcagtttgacagattaaaatatttctatgagggatttttgttcatctctccaccctaaccctctagctccccaccccccatcgaaatctttcttctcaacaagctcgcccctttccctgtactttcaacaatgcagactgcttcagagagccctgtgtggaccttttcagggcccgtggtaatattctctgcatttttccagtttcagggtatgcgaagctgaagcgaaagcagctttggcttttgagacagggtctgtcactggtctggaactcaccaattaggctaggttggctggccagggagccccagaaatctgcctggctctacttccccagcacggagactgatcgaaagcacatgctgccatgcccagctttgttacatgggctctgtggatccttctcagcccctcatgcttgcaccacaagtgctttaatgactgagataacctccatgtcctcagtatgtcccaactattcactctgtccctgccgccttgactggggcctggatgtacatcagaaacaaaatggctgtgggccttcccttacagagtggaggtagacattaaacaaaccataaagtctgggaccagaacattccatcaatgccataaagcaatgaaaaaaaaggtgacgaacttcaaaggacatctgatatgcattgcaggaccaaagggtgaacctcgagatcgtgggaggcataggaggcaaaaaggtcatcaggttccgtcccaggtagccctggaaacctgtatcctgacaggggctcagctgccctggacaagccatggtggggtactgtggatgccactggggtgtccatagtcaggcctcagcactggtgaaagtcacatttccttgaacctccaagcccctctctttggagtgagccattggcaattcattaggaaggcaattaaatcagtacaatatttacaacaaactacaaatggtgcacacagatgctcctgtctctctcctgagagccttcctccctggggcagtagaagcccccagcaagggctcagcactgcctccaactctgcctgaacctgggatgtgcagcctgggaatccaagccagatgagatcttgacctcttggcagatttcagcaaatgctcttcccattcatgtgttagcttccttatgtgtgtggtggtaaagcccagggcaggcggcgtagctagccatacacctttatcccctgagaatctacgggggagttctgttctccaaccgtaaaggatctacgtcatggctgtcatctgtgacaatcagcagtgggcaaattatggggatcagaatagagcacgcgcagcttacagcagtccagggtggctggcgtgtggctgggctggtcatatcccagctgtttgtgcctttttacgccagtaatgaacatgtcccaggggtagcttaccacacattaagatcacttgtcccattaagatgctcttcatcttcaacccaggaagtacctggggctcaaggactgtcagtgggcaggggggacacaaagggctagccctttgaaaccagggcaactacacttctttctattagcccaacactgcaaggctatttctgcccacagacacgggagcaggaaaggctgattttgcctgccctgtaatgggtactactttcctgtgttctctgctttcttatttcatcatgatacccccagacaaagtgaattctttaaaggcagcaggtatatggtatgctactaatcacgcatgtgcacatgcatgtgtgcacgtgtgatacatggatgctcagtcaagaggttggatctggaggtactggctcctaaaaaggcctcgtgatctaatgacaaaagatttccctgtcgtcgggaaatagaataattatacaagaggacagtcccaggtcacctccagaattgggtttcaacagctgtaaggcaaatccccataccagccttcagggaggacattgctgtagaaagtggcagttctttttctggtgacagaggacagttgatcgcctgagagacccctggatgtccaggctggccctgctctagacatggtatccattcctgtctgatgaacccctccttttaaaggttggggagagcaagttcgcacaagtaaaaccctgctctcacatggatccagtgagcagcccagctgaagacaggaggcaccggatgttaatcagagtcatcttcctgatgagtggtgccctgcaccctggctcccaggggtcaggcagcagagacctgtgaggagcagacgtggtggtgtgcagcagagggaagagtgtaggaggaggagggggagtcaggaaagaacctggcctgtctgtcagtctgtctgcccatcagccacagggctctgcctatacagagagccatgccggacaggtgaagccttcggaccggctcaatcatcatatttattctaattgtatcgtaatcgtccccaaggagcctggttcaaatgagcttgacattattaaaattttaatgcccagttttcatagctgaatgaatatttaaagggtatgtcccagcgtacgttatgatgatgaagaaattaatggaatgtcttgtttaatgcatggctatgtgttgatgcaaagagtggcagagggaggggctgggggcagggagacagagctagagggaaagggctgggaaggagccatttgtctgcccaccctctgtctctgtaaggagcaaatctggccctaaatccttttctggtgagatcagctcagtccatacatatttctttccccaaagcagaaccaggagttgacaagattggacctgagtgtgacaagggacaggaaagggccagctcctttctggtcctagccatctatgcaaagctgggggaagtaccacagccaagccaaaccagtttgctccctctgagggagctctaccgggaaagagaccccagatcccaagcagtcttcccagaggactggcccaggggcctctgggctttagaaagctgatcctaaaccagggaaggctacccctggctgggctgacaccccttcccagcctggaggcaggatccagaatgaagaacgttttcaggaaaatcccatgtggtggctttctcagggtaccccacactgtcgggatgtgtgtatggatgacagaaaaccatgaggtgggaataaggtagggaccaaaggtgtcctgagaccctgacttgggctggagaataatatttgccacagtgtggcctttgtcacttcttgtcattcatccttaattcctccacagactctcttcctctccctctaccctcccccaccatatcctcnnnnnnnnnnnnnnnnnnnntctgccacacctggctctgtcctctctccccatctctgtggccggacttggtatcttccaccaggccagcttgctctgctcacactcccttccctaaggcagcatcagagtttggcaatgctgggcctgtggaatgcaagaaacagagaacagccttctttctagactcagcctccagagcagagcctgctgtagggaggaaacctccacaccctaggctggcatttgacttccaatgaaaataaggaagtctgggcctgtgtgtcctgtggccaccctgcccagcacttgaggcgagcccagcaacgttatcataatctagcaagataatccacatagcagctatggagtcctgagcaatctaagccccccagcctcttgcaattggatcccaccctcaagggtgccttttatgaggaaaagggtgggttccctgtaagagccttccttcactcgtttttcatgggtcgggagtgttcatcttctggggctgctgggtacaagatgcttgtgtggtttaaactaccaaaatgtattgctcactaccctggaggctggaagttctagaccagggtatgagcaggactgattttgagcaaagtctttcttccctgaagacggtcaccttgctgtggcctcagtggcctctgtctgcatgtgcacctatgtccctgtgtttcctctctgtctcctaaggacagcagccgtgtgggacttgccatcattacttagactgatgttacctccttgatgctcactgttttcccaaatataattataccgagggccacagcttctctgtatggacgagggctgcaagactcagtccactccagggacggggtcagcctcaatgaatggcacaaggttggggtagagcaccgcaggtctgagaaatgataaggagggagatatacgtggaaatgtgggctgggcgtgtgagggaggcggggagcaggaaacttccacactaacaagattacacacaacttggcaggccgaagaatctgtcccaaactgtccttgatacttagaaattgtgtcttctccgcatactgtttgtcccttctcccccaagtaactggggtccccaatagacaatccatgctgtctggtctctatgtccatggcactcctgcctctcctcctagcatcctagtcaggttcctcccagcaaaatgtagatggtcatcctgactgcagagaactgtctgcttgaagcgcacaaaggctggagagatggggtgagagaaaccaaggcataattgggttcctaggctcaaccctgctaagcccccagatggtagaggggaatatcccaggtgggtactcaaaagtgatagctggggctatagcccagtgttagagtactggttagcatgcacatagccttaggttcaatccccagtgagctgctgagctccaagcagcaagtcagtagtgaatcgccacccccccccccacacacacacacatacaaagcccctctcctgtagtgacattcctggctggtcttctagacactaacattccttcaatttgaaaaagactgctttgttgagggggtccagcagcaccctgtcgtgcttccacgggctggcagtttgttgtaatatgacagccctcctgtggctggagagactgaagctttcatacaaagcacctttctttcacccccttccagggctgtcaatcacgacccggtggtggcaaagcaggacagcctggcccccagaggccagtcttgctggccttggctcctcctgcctctcctgcctctccttccttgtctgccctgactgtaaatcctgcgtgctgcctctgtccttccttgtgtggctctgcccttcccctggcctcagcttcaccttgctgagtcacaaagtcctccctcccaatgcccagttgtcttaacgcagccaaaactcacttcaaatcctagactggaaggcaggaggctgcttgtgactgctggtccaggccctgtaagggaggggaattgacagcaaggtgctgtggaagcaaatgcaaaaacagcctttgcagactttgccacaaggtggcctggaaaagcacgtgatggtctcttggcctcggcttctctgcctttaaaatgggggtgcttttgccgttctccttgcgtcttgtgaaagaaatgcaactgcaaaagggatcggggaggggcatacaggagaaacatgggcgtcgaagacataaagaatgtcgcattgtgtggttctataatttttattgtctgaaatacggcgggaacccaaggctggagagaccaccctcgtacctcggaactgggtttcaacctgctgtttgagccacgatgcttggagttcagagtcctctagcggccaaatatagtattacaccaattccagggagaggctcgcgcaggcactccagtgctccaatgccccttatttcccacaaacaggaaaactgatggtgtttactccaccttcgcaggacctctctgactcccatcgggaactccagcctagagctccgttctagacatagaagcgggaaccatgtcctctgccatctctgtctcccaggccagtcttagagatgaacaggtctgaagtcagtcccaggcagggtccagctcggcaaagccagttgtactgagggaccccagcgctggcccacaggtgtgcctcgggtagaggagggctttccgggtgaagagagaaggaataggcatgccatcaacttcagattctgattctgttatctggtatcgaggtattgagagttattcaaaaagggaagagcttcttcaacccagaaaggcacacctccccgaccccacgccgcgcacgaaatactgggctgtggagaatgaggtagtggaggaagatggatggaaatttgagaggatgccttgcatgcctctaggtgtgcggggggggggnnnnnnnnnnnnnnnnnnnncgtggcacttgcgaactttagctctttgattccccccccccctccctgctccctgtaatgaatgctgttccctctgctttgttgcagatgaaccggccgatccaggtgaagcctgcggacagcgagagccgaggaggtagtagctgcctgcgccagcccccttcacgtgagggcccacttgtctctgaccccctcccttcctcctccttccttcccaccttgtcccactgctgcgactccctacttcttcctcttcttgctgctccctctcagaactgaaggctagcattgttgctctgaatgactgatgtggaaagacagtatggagtggctaggagacaggggtctgctggacagagggaagggtggtgcctgtctaagaaactaggtaccatgtaggggttatccttttacactctcttaggcaaaccctcctgtgatgcgatttgaatcatagaccactgccctgctaggagagaaccaatggctgcagtctcgtttaagaggggccaaggctatgaagaaaaacacctgagaggggttgtggtggggctgagggccacacaaggcaagtacggagataaagattgaagacctggatgcaagcaggaagacaggcatgtggaagggcacagggagaggacatggctttacctacaaaagctcatcccagaacatagagctctccagagactggtacaaggctgaggaccctaacaggcttacacacacacattcatgcacgctcatgaaagagatggatgggggctggtgggatggctcagtaggtaagaacactgattgctcttctgaaggtcctgagttcaaatcctagcaaccacatggtggctcacaaccacctgtaatgagatctggcgccctcttctggtgcatctgaagggcagctacagtgtacttatgtataataataaataaacctttgggcctgagcaagcggagttggctggagcaagcggggccgaccagagcaagcagggttgacctgagtgagcagaggacctaaatacaattcccaacaaccacacgaaggctcacaaccatctgttcagcaacagatgtattcatatacataaaataaataaatctttaaaagagagagagagggatggacaggcaggcaggcaggcaggcagatagacagacagataaataaatagataacccagaagctcagccctgggaagacaaaacatgtggccagccagggacatctgttaccaggcaacagttctcctggaaatacagtgcctacccacctcagctccagggtgatctgtgcccaccctggcacggacctatttctagtaccgcctagataggattcatctcagggcatggacacaccttacctgatgctcactgaggatcctaggactctgataattaagatgtagtgcattcaggcatcaagggcctaagtgagcaaggccacaggctcccttctccccactctggctccctccttgataaaggcaggatcatgtccttgctcagtctcactcagggcttaagggtctctcccagaaatggtctctagaaggcagacccagcgagaacaggtgcaagtcacctgggctcactctcccatattcaagaagctctcaggtgccagcatactgcttagacaaccaacgccaccagttatcccagagagggacagccagataagttgaaggaggcaacatgagaaaatggaaataaacttgaaagaaagggatcccccagagctggggatgaaccagggtggcatgaacaagacctcacttagagaatctcagagggatggggcaggcctggccccagcctgttctccagaacggaagtgggcttggggtactcccctcagccccagcccagcagaatgcctgctctaatactcttccccaatcccttgcctgggaggcaattgctctccaactccaagctgctaacctcatcgcctttctcccatatatctcctgtgctgacacttgccccaagccagattaatcagctcttttattcttgctgcggtggaaagggagggaagaggagagccaaacctaaacatctatctattaattgcatattcaatattaaacagggagatggtcctgagtcagcactatcaccaagctgtttttttcttaagaaagttggtttaaaacaacttaatatccatttaatatttcttatggggaaagggagggaaaggtgaagattattaaaggaataaagaagagaggtgtggaaagaagggaagtgtgggatggtggaggggaaatgaagtaggtaaggaggaagaggtgagaggagatgggttggggagaggatgtaactcagtgggtaatgtgcttgagtgatgaggtcctgggttgggacccccagcacctagctagaaagctgagcatatgtctaggatcctgtcactgggtcatgaaggcaaggtgtgcagacataagaggatctcagggcttactggccagccagtctagccaactggtgaactccagggtcagcgagagaccctgtcttaaaacaataaggcagagagtgtctgaggaaggaatccagtatcagcctccatatatacttacgtgagcatgtacacacacgcagacacacacacatgccacatgccgcaattttttttaaaagaaaaatgtgagagaaggaaagaagagggaggagaggagctttggagaatgggtgttggagccaagagggacaggaaaggacgtacccccagagcagatggtgatggtgagccctggtacacaggctgcatctttgtctcaaccccagcagctctgctcccagggcactcagcattccaaagacctgggacctgggatgcgcatacacccctgggatctccacccactgccttcccggtcagtcaaaggactttggcaggaggagggcttctccccctaccctgcccacactcaggcacttcaagggcacatttctcattccacttcttgtgcttctagcatctcatggtcacactggggttctgggaatggacatggacaggtgtgggtagaactgtgggtgtaagggtggccttcttgcctacagagctctgctcgcctctggtatagatgaatcgcttggttcgggctgacaggaaccatagcagagcttttttttccttttctctggtgtgaggttagttctggccacgtgagaaccagagggtccatcggagcctttggctgacaggcctggctctccacagttcagcgtttccagaggcccagcctactgctggtgggtatggtcttcggaaggaaggcctccagcaggaacgtgaggaaggttacagtcttccagggcgtgtcccaccctcctccatgcttagctctggagaaagttcacaggcaaatagacaaaaaagtagccacagctatagcagaatcatgccacttaaagacagggccagattaagctaccgtcacctggcctttggctggaacaggtaaagcccacgttaaaaagccaggccaagtctctccttactagctgggttgtgttttccccaggtcacagaagggaggttgagaggcagcctaagagagcctagcagggcgccccatgagttcagggaagtgggtcaggtgagagaggcaggaggagggagtttcctgaccatccctaccctccacccctgttacaggcctggaagcagacagattaaggagggaaagggccctgagcattgcctgggaaggaatacaaagaagtaattctgtaagctgctactggcacacccccaggaagcttctagaaatgaagaattttcttttatatctcatctttccacacacaccacccaacaagccttgcagaagcatccagttagatctgctcctaggtgttctctctccctcccctcccctcccctnnnnnnnnnnnnnnnnnnnnnnnnnnnnnnnnnnnnnnnnnnnnnnnnnnnnnnnnnnnnnnnnnnnnnnnnnnnnnnnnnnnnnnnnnnnnnnnnnnnnnnnnnnnnnnnnnnnnnnnnnnnnnnnnnnnnnnnnnnnnnnnnnnnnnnnnnnnnnnnnnnnnnnnnnnnnnnnnnnnnnnnnnnnnnnnnnnnnnnnnnnnnnnnnnnnnnnnnnnnnnnnnnnnnnnnnnnnnnnnnnnnnnnnnnnnnnnnnnnnnnnnnnnnnnnnnnnnnnnnnnnnnnnnnnnnnnnnnnnnnnnnnnnnnnnnnnnnnnnnnnnnnnnnnnnnnnnnnnnnnnnnnnnnnnnnnncccaccataaacccaggccccactccctcctcccagcccctccgccatctgtagccccatcgggtcctgtggcttttgaaatcctattacgttcctcatttctcctccaagcatcgttctatttctaaacagacagaccacatgtggtccctaagggttcccaggggctttgggggactagctgaggggtttgcgtccaggcagggcagctggctcctcctgccgtggctcgaggagacccgtggccataacgattgaccccgagatgctgcatttcccaccgctgggctcttccaacaatacaatcctcttacactccaaaggccgtttacagtatgttctaatgaaatggacttgcaggctgaccctgctttgtggaagtgcaccatacagaagtgcccatttttccatcttcggaagcaatgaatgagcgctggacaaaagttcctggcagaacagtaccccctctgggttctgctgaggaagccctcaggccaggcaggtgggaggggttgcagagcagaggaacgctggcgggctgtgcttccagccggaagccatcctgggtgtgtagatcacaggctttgtcctgattccgttcactccgacctctactttggagctgcccaggggatccagggatgaacaaagcttagggtagccagcagaatgaggttggtgactggggcccccacagcagccaccaaaagaagctgtctgtcaacactttggggcacaaaatgttcacccttcagcattgcctacgcctccagagtccccacagcaggtctcaggtgctggactggatggcacacgcaccatatatgagcttgagtatggctgtgctttgccctctaccagaatttgttttagagctgggcctccctagttcatggggactatgacagcgctatcttccctcccctgagcagtctcttgaaggagatgctatggcaaaccaagggtggctaacttcacttttggctaggcaccagactatgtaaccctgaagaggtccagaagtgatgctaccccaccccgtgagtctgcccctcccctagccctttccatgtgtctcgggatgtggatggaatgagcagtagctcggtcagcaaaatgcttgccacgccaacacaacaccctaaatttaatctgcagaacccgcattaaaaacaaaacaaaacaaaacaaacctgagcaaggtgtgatcccagggatggccaggcagaaacagatccctaagactccctggctccaggagctccaggccactgagaggctttcttttaaaaacagggtgtggttggcaagatggctccgtgaagaaaggtacctgctgccaagctggcggctcccttagttcaatccttatgacccgcatggtagtaagagggaaccgttcatctagtgtggtctctgacctccacacatgtgtgctcggcccttctcccatccaagcaaacgaaataaaaaacttaaagaaggccaattgcagttaaattaaactaaaactaaattaaaatttaaagaacaagtaaaggtggaccgcattagtgaaagaaaaccctaggttaacctgggcctccatatgcacacatacatacaccaccactacacacacacacacacacacacacacacacacagagcataaaacccccacaggcctgtagtcttctatctcaggcctgttttggcccctgttaccatagtaatgtcgtcatttgtatcatgttttccctttagccaacttcaaagcccatgtctcaggttcattttagattaatactgaagaagaaaaaacccacagtaatgttcatctcaaatgtaggataacaggcccagggcatgctccactggagtccctgctgtggaccttatgcaggaacctgaaagacctggaagggctgagcgatgggcaaacttatgactaagccaggctgtccaaccaaggcatggcttccctagtgatcaaggtcgatggtgtgtctatgaacacgctctctcagttttgcttaagcatcttcatctctcattctccctaaaccatggggaaagtcccactctaccttggaactttcattctcaaaaacaaaacaaaacaagacaaaaagcaaacacacacacaaaaaaaaaaaaaaaaaaaaaaaaaccctccatttttctaacgtaaaagaatctttatctcctttctcctctagaaaaggaattattttaatcctagggtccctcctctaatttacacagctacaccagatagacctgtgaggacaggtctttgtggcttggggaggagactccatggggaagggtccctagggaggcccctaggcactccagtggagcagacacacattataaatacatctgtaactcccacggtaggtgtgaaaaatataattaactgcaaacctgctgaatgtaaatggactctaggtctgcagctgggggaagggcgtgtgtggcttgatctgcggtccggttttaaaggaggtttttctgttttgttttctttcgttttgttttaagcattaaagttaagactcaagctcctccacaaattccccgtggccccagctaatttagcaaacaacggtttcaggggaaatggggtattaatcatagccaatggccttctgcatgatatttaaaagtgcctcctgcctgtgcgcctgggaatgggaatgacagagagaggggaccaggccccctctggtgaagcatcccatcgccactctcagggcatcctgtcccttgcacaggagggtgctcccacttctagggaagataggatagaggacaaacttccgagaccgtgcagtacccagtgttctcaggctgcggatgcaatccccgagaccggctgataagaacatggccttggttagagggtaacagaggcagaacagggagaggaaataggctatgttaatcagagatgggagcaggaagctgagcttgctccgtgagaaaatgagctaaacctaagggcgtgagaggcactctgtgagccaggatgtaggggtccagctttgagggttgatgtaaggtacagaaaccctgattttcacagcgggctttgaacagaggtgtttaggtaagggtacacatgttcaggcttgtgggttaggggataacatgatactagtggtgttctgggattgctcagccacatggtgtgaggagcccaagtaaagatctgggcggagatctgccccagcttcccatcttggttctgcctttaaattccccgcctttcccacaaagccagctgctctgagggctccatccttggattgcaaagaggatgggcacaaccccctacacttctctttgcaaatggagcgtagtaggaaactgtgggatgtcccgtactcgtcgtcattttatgtttagaggctggtgtatgggaaaatagagctggtgacagcgtgaggccctctgacgaggtgcggggaatcaagtgtggatagaaatcgtaccacgcaggactcccaccagactggatatgtgaattacagagaggagcagcacagagaggctgccaagaggtggcgatgagacaataggacacacgtgggctgcagcagcaaaggtgtgaaattagagaccaggatggcaggtaatgcgggaggcactccagatgtagaagaatgggtttggttggaaaggagtgtctacttcatggaatagaggagccaggacttggtgtttatgtatgtgtgttggtacatatgtgaaactctgaggcaaggtagtaagagtttggttttctctttctaccatatggattctgggaattgaacttgggtcatcacgattgacagcaggtgcctgtatccaatgagctgttttgccagccctacttttttttttttttttttttttttttgagacagggtctctcactggcctgaatccagaagactgggtagtagctcagagtagggaaatatgacactaaaacagaaccttgggcttgggccagaggatgtgaagagaacccccaagtcagcctttatgtacacaagtgtggtgggcatgtcccaaaaggccttggctggtgtcatttcatcttaaagactgctcctcctggcctaatgttggggataacaaggctttgtcaatgcatgtagcagccgctgctggcactctagagacggaaagggacactagtgttccagttctgccactgagcttctagtgtgagaggatcctccctggtagcatccttatgtgcttggctgagcagtacctccatttatggagtgagaaatgggactgggaggggagagttgacctccttgagacatacagccagtcattaacctttttgtctcttctgatcatctccaaatcttgctgacttcccatagggctttgaaacttctcacaactgctgactcaaaaacatgtccttccaacatccaagcccatccatcctcttagccaccgagacgaggctggaccactgtctagaatggcttctcttactccttgcttacttttggggagcaaaaatacaagggacctcagagagggtctaaggccgcacctgttcaggtttcacccagctaatggcagaaagagcctatctgaagccataaaactagaaaccagttaggaggagcaggcagtaaaagccagcagaagctctattgaggaaaagcagcctgaatcaccagagccttgcccatctggaatacagattttacagacatcaacaggatccatgctaaggatatcttaggatttcagcaccctgaacaccacagcccatccctgggtaacaggccacggtgtctcgggatgcttgaagcttgtggataaatggccaatttgcagtgacttttcccatccgaggtcaacccctatcctgcagagtttatgaactgcaaagatggacgtgtagccctaggaaggtgtttagcagctcctgctaggctctaggccctggagaagctcacaagctacaagaataagctccgttgacatacatgagcaatagagacagcgtgtgccatggcgggaagagggaggcctacaccaactgggggcagtctgagtggccttctgcaggcttctccacggtggagatgattctagaccgagataagagatacagaccccatggcctagagcatatccagggaatataaagaagtcaaatagtccagggaaagagtcccaggaacaccagaataaaatgttggggtctggcttctggaggaagaagaaatgacctgggctctgaggaaaagtctgaggtccataggagctggatgtgggaagatggccacctacagggaggtctggtcaggctccaaggagaacaagaggcccatggcatacagaccgtgatgatgggcaagaactagaggagtaagggcagagagagattcagaagccttttgtcactagacagtataaacaaagccaagtcgtccctgccctgagtatctgctgcctcacaacctccagcacacatccacctctgcgacacacttcctgacccttcccggtcacccagctacacagtccagccctcctcggtctgttttctttagctgttccctagtctccagctcagacaccctcttctgccctctgcgtgcactgtaaagtcaggcatggtgttaatttctcatctccatggagaccgttcgctgcttaaggagagatatccttgacttcctcagagcatggctgagcatgggcatctgttgacacctgctccatgatgccactcttgtggccatggctgaaaatgttctaccctctccagttgggccaggtggagaagccgactccggtttggacttcctacccattctggccccacaagctgaggaagggtgggcagggggctggagccactgacattggcattctccttgaagcacatcttaataatttaatggctattagcagggccactgtgggggggggaggggtgcggagggaagatttatagagagaattcactccaggttggggttttgtcttcctctgttttcctggcatttatcatgcatgttttaatttggatcggagagttgctaccatctggccattatcgcaaagaaatattcattttcactgagtgacacaggctccattcatcacagagcatgctgattgccctgcaagtgtgggctgcactctctccttcactagaaatgaaccttgagctgtggaggaggtccaaagagccaggagcagaggcacggcactgacaattaccattgaccctcccagccatgccaacagggagcagtggggggaggggcagtcaccacacgtccccacctccctcacctgtcctgctggaggtcctggtggcttcttcagcttcctcttagacaactgacaagttctcccagcagcccctatagagtcaccagatctcagaagtggcaaaaggcacctctctgacctctcatggtacactgggttctgatgtcatcctatcaagggtggggtctgcctaaggaattgttccatattagaaccctacctgaggactatcattacatgtcagggccaggttcgagagagcatacccttcctttccctctcaacacacgatggtggcgtgcgatcaagctcgatttcagggaagagatgagtgtgcctccctgtatgacacttcctttattccaaccaccactcaccagggcatgacatcagaggacaggacactgcagggacagggagctgggagcctcctctgtgaacccaagtatttaagacttagactttcaagggggtggcacagcattccctgcctgggcagggtcactcagtaggcagttcttcggggccacagaacagaaccaggaggaagagtctctcttcatctactgcgaggcacaagccagggcactgggagctgctcaagatcttcctgatgggaaaggtccaagaagcacagatgggcgtgtccctgggaggcaaggcacgtggactccatggagactgggattcttagactctggcagggctgtatccccttctccctgcccctgcaaccccaccttacacacttagaaagggaaggagttagggacagaaataacatcatggaatgagagttgctgggccagagaggcaagtttggcaggagagctttcatctgaggaagtttacctctcctgagtctagagagatactcattggtccaggaattgtggtcagaccccccagcctgaagtcctgacacacctactaccaccccactacagggcccaggtttgacctagagggccgatctgagtcgaaggacatctctagcctagcttccttccatcttttcaagggattactgctcagttggtcagaggatgtaaatgagactccctgggtttacttccaggtcatcagagatgacctgatcagcagataacctgatcgtgaaggaaagaccatcaagctctttgagaactggtatttcaatgagccaagatagcagggaccataggccaatctaggccagttagagcagcatggcattctagatgtggcaacttgactgcttgtcccttccagacagttctttagtgtgtgttgaactaagttggctgtcccttaaggaccttgtcctgcctttcccagggtagggatttggtgtcctgctcggtggaagatgaagatattccttagaggaacagagcaggcaggactgagcctgtgccacccgcacacagtatacccctcctcccctggaactctttcagtgacaccaacagctctgaaacatctgctcttccatcctgggacccgcaatttgaataaattatcccgacgtggaggcagcctgttattaatggctcgagatttataagatgctttagtttaataacgctgtggcccggcactgtgccactcctgggtctttttaaatttcaccctttcccttgcttcagtctcacaccaaccacagccgccttctgggctgagtcccagaccacatccctacacacccatcacgtacccctgcacccagaggctggctcccttgttccactagcccccacctgctcccagtcctctttcaagtgatgcacgtgtcgtctgcagatctcccttgcagacctacaacccatggatatcagtttggatacccggaccccactcttgctcaaagaaagcccaggtaactgcatgggtaggactgggctctgtacagagtcctgttccaggcccattctgagctcctcacccactgtctgtgtgccttgtctttcaggacatggccaaagcctagggcgagtccactgcttatttctctattcaaggcatttggttattccttctttagtttgtccttcctttaatgagcctcatatcttagtcatggagcccttccaaactaaatgcaatgcctgtggtactataaacccagctgcaagctcctgctgtctgctgcttcccttgttaaggggcccccagggcgctcacctatggctagctcttccagagtctctcaagtctggtgaacactaggtgctcacagtgtgttttcagtatcaacctttctataagtgttgtatgggtgaggtttccttcagaagcagggcatgctccaagaaggagaatgcagactgagagatgaattagggagctgtttgtcacaggtggagggtagaacaaaaatggtgactttcaaatagccagtgtccttatcctgtcccaaagtaatgtagaccttggagcctgggcactagctcagggtcaccccttcaccactacctcagatacagtgggcccacaatgattgaagagcctgctcctgggagcactcaccaaagacagtgtttagaagaagaagggaaagacacagggccagcctgcatgctccactccccgtgagtctccatgttactgatgtggcaggctctggggaggtcttgaaagatccttctctgccagggccaagcttaactctgtggctcattgttcctgtgaacccaaggtggccatggtgtggggtgtggaagggaatacaggctgtactcagcgtatctctccaaaaattcctccccatacccctctactaagttttgaggacgactggaaactggttcttgctgcttcacattgggctaatgtaactaagggactcttgccttttgctaagagccccaccattagaacataattactgcttaaaatgacctttaaaatatgttttaaattcaaaatgtctttaaacccttcactgaacaccatttttcaatttcaacaactgtttgctttggggggagaactgaggggcgggaagtgaaggaaagagcccccccctttggcggatttcaataattaatctcttctcactgcaagggaagtcttacaggaggctagggagggtaggagcaaactggctaacattacagcaaggcctgcccttaatcccaaccagttcagtctcctcagacaacaggctccacccaccctccatccaccagtgcccagcaccctgcctgacttgtctttacttggagagacaaagaaagtgctcctgcacattttctaccccatatatgcgctcctgaagagccctgtgcgtttctgaaggccccagagagtctcgaatgccttccctgccacggccaaacttaattgtgtggcttcttgttcctggaaacatgtccggttccctgtctgcttagcaacatgccagagacctcagttcctgtggagttgtaccttctataggttcaatctctactgtacttggctgggataccctggcttcctgaagtgcaagttcacttgaagatagcgacttacatagtcaataatagtgctgcagccagtggaggagcaagtatcagccagtgccttctagcttctagtagggtctgaagaagaaggggtttcaagcaactctcggggcttgtgggataggagaagagcagcttagaataggtgagtctccaggggagagtggtgctgagttgggagaagctatctggccaacatcttactttgcaccaagcagcctagcagcatgggcagatagagggaatgtggcatggggacagctgctcagggcagaggcagtcctgctagggaatgctagctgggaactggaggcagtgagtgtgcccagaaaggtgttagttcactagtactgtgtctccctcccagcatagcatccactggaggattgggcaatatcatgcattgtcctaaggggatgttggggacatatatagtgactggccattcctaccgctggggtcacagaagggaacactgcagtcttatgtcatctcccacagccttccttatcaatcttccctcctccaccctctgttggctctgagcatcttcttcctcctggataacaattcacctggatgctacatttcattcactgcagtggtcctagcaagggcttgtcatttgcactcagatgtgagtttggtctttatgtaccctgctcctgctgcctctgtgatgccttggttgcctctccctgcctcctggccttctgggtgcccctcaaatacccttattccatcccttgccctaactgttcgctttggtaggcattgcccccctccctagatctcagttctactcacttgtttcagcacctgcatccttctcaaccaaggcccgcccaacaggtcacattttcactttattcatatgccattccctccatcttttcttaatcattgtccacccctcccccaccgggaggtaagctctatgccttgaggaactctccgttccaattctgtttcctcaccttgaacaatgcgtagtccaaagtcaggtaggggatgaatgtttgaacccacaggacagggactcacatgcactgacatgagagagatgaggcatgggagacaatgaaatacacgcagagagcatcaacaacttcaggctcccaggagtcaaggccagagaatggaggaaagactctgcacaagtatggtggcccagaggcttagatctgcctggcggggttaaggaagttctgagtatcgaagggaagctggtaatcaatccagaaagtgagaggacctggatagtgaaggctgatgggttctgagtgtcaggcccaagaactaattgcctgacaggcccatgagctagggacattggccttaggagtgtgtggggtcaggctgttggccgccaaagtgggaggcagagtggatagctgaagcccagggctgagaatatgattcacaacctggccagcttccaggaacctctatgctatcaggcagagaaacacatttgagaaaacagaattgtgagtgtaactttgaagcctcggttgtcatgggaacgtatctgtaaatacttaacggcaaacattaaatgacaccggaggagtgcagcagcagcagagacatgtgcccctggagacagcctagtcctcagctgctgccttccatcactgtctcagaaggccacgtggtccctggtcagtgtcccttcccattaacccttgtgttcccccttccttgtccttgtgagccgcacacaatgagagagtttcaaagggttaggctctgttaggttcttggtttcttgtcttgctccttgggtccttgactcccataagcttctcatctgcaggcactgggcctttgggccacagggaagggaactctaagtcaggatcagatcaaacaagtgggtaagttctccttattaggagaaggctctgagggactgcagtggggctcaatgaagacaagcaggcttgcccctctcttctctctctctctctctctctctctctctctctctctctctctctctccctctctctccacccccttctgtccaaactggccttgaactccctaagtagcctcaaacttctcatctttctcttgtcactacttcccaaatgctaggcttacaattccatgccactgtacttggcttgtacggggctgactgtaaagccagggcttcagagatgctagtcaaagactctacccgttaggctgtatctccagggctccctcccaggaagcgttttattcatctatccgattgtttcaaaatgtcaggcagcatagccacctgccaggccctaggctgagtgctggtacatgatcttcaccatctttgaacttagatgatggaggacaggaagtaagggctccaatggagaacaccaggagaggtggatgttatcggaagaaggggatataacagtcctcactggaggagggagcagtggctgatctttgggctgttttatacagtctgattgctccctcatactaggtttcagctatgggtccccaagatcccatggccaggtgttcctacctgttatctgccaattacacctgctagaaggctgaacaatgattgatgtctaggaaaaaaacaaaggagttgatttatgagttgcatctttaccagcttagagactggtcctcggggtggagagaaacattgtttttaaaataataataattaagatcaagacaaggcaaagatcatacatagcatttctccaaggcagagaaaactctcaggcatggccctaagaggagatatcaaatagggccatgggaactcagggatgctgtagtcacctttaagctatcacaaggtccagagatggactaaggtccaaatttttataaatgaagaggccagatgtccaaagctggcagacctgaaatcctgaagaaaacctttgacaaaattctggaataaaattgtcatgctggtgtctggagagcaactggggacacatgatggggagttaggaaacagcatggtttacccacaatgattcacagcagaggaactgagtgtgtgtttggtaagccggtgccccttgaatacatggaagaatagggcctaacctttataatgtcacctagtgaagctgggtagcaaagttacctcacgagcacagggcagtaaaggaggtctctatcctcctcctgtgtcgagcacatttatcaaggactttgtgaagtggagaagtcagaaactgaaaacttctgagactccacactatctcagggaggaaatgctgatatatttggggtccaaaaacatctcccccatgaagttctcattcctaacgccaaaacataagagttcctggccttccctccaccatcttcctgcccagcagaaatgtaaattctacacatactccattcttaatgcccatgacctgcaccccagagatggatggagtagaaagatttgtggacattttgtacaactgcctatccagaaggcatctgtcagtaagtgtgtatcatttcccccttcctcttgacccccacatttcacatggtaaccagacagcatacttctggctcctggtcccttggaagagctgatggaagctacgaccctttctctagggagaatatacagaagtatggatggtgctggctctttgtgtatgtgtgtgtgtcggggggtggtcacagaacttctccagacagtcctataacttctgggaacaccgtgggcttttagtagtcagcctctgcaaggcaggccttcgtgaagttattgaacaactcactatgacccagacgattcctttgtttgtggtagagtcgggaaagtgttcacccaggctttggggtctctagtgcattagatagtgtccccggaactcatgtccactcacaagccactcaaatggccttactcagaaggagaagctttgcagatgcagttaagatgaagtcatagggaactaggggcggttctaacgggactggtgtccttagaaggaaatatggcaccaacacagggaaaagggaaatccagatgtgataatgaaaacagattggtatgatatagctacatgctgaaagaggccaaaatgctccttaacaccagcagcaaggcagagtcagggcaaggtgctctcctaaggtctgagagggaacgcagtctgatgaccctttctaagaagaggacgctgctgctgccttaagcactacatcattattcttgtgccaatttcagaacctgaaggagggctctggaacagaagatttaggggggttctcagcaagtatagatggatctctgctttgtccttcatcccatccacacttgctgagttccaattggtatgcatgtaaactatggtaccagacagcccccagagctttgccaacaagaaagttccaggccaagtgaagaaaagttagaaatcccagcacatccatcttaataaattttattacagcctgccagtttagactaatgactaatttactgtataaaatgccagaagcatttttttattttgttaattaattatctcaaacaaaggtgaaatttataaaagtgtccagaaacagtgagtattgtaaaattgccttgcagcaggagatgaaattatagctaacacaggatcaggttattactgtattgacttagctgctttatgacttcataatggatttcttcattattttcttaggattgtggcattcatgattgcattaagtctattagtctatgcaaatatcattaggcaccactaataacctcagccacttccacccattccagggaatgtgctaagtagttgtctgggtggggcacttccggcatcagagaggatgtaaggccagaggtacttttggaatgccccctccatacatccaacgggtaggaaccttaatgaggatttttgagggtctggggtggtctccccatcctgagctattttacatcttttccccaacaaggagcctgatatgtcaccataaatcttcatccctttagagtaaggctttggaggcacatattaaatttttctagaaagaaatatgtattgacatgctatctgtcatggaaatgacaagatgttcaatgggagaatctcaatctgttccggctgctcgaacaaaatatcataatctgggtagttcatcaaccacagaaatttctctctcataatgctgggggccgggagatacaagccaacaaggatgccaacagatttggtgtctgctaggctaactccacagaaaagaaacacagaagctctctcaaagtgagataaggtcttgcatagtccagactggccttgaacacacttcatgattagtcctacgtagccataaataaccgtggacttacggttctctagccctcagctcccaagtgcatgagattacatgcacgtggcaacctctggcttgtgagatgctggagatcaaactgacaccctgtgctttactaattgagcttcaccctctgtactcaggcttctattctaaaggaacccattccagtgtcaagggctcttccctcatgacctagtcacctgagaaagattcctaaaatcattacctttcacggtaggacttctctgtatgaattatggggcgacacacacatttaagccatggcagagagcattaggccctactgtgcaggacaaggaagggattggtcagttctatgagaactgggcctgtttatgtatactgttggtgaggttgagcagaatgggatttctagcagatgtctgtagactctggagaccacaggggatgtccttgggctagtaggatagaagagcatggtggggagaggggaccatgtgtgaacagccaccagtaagtcaaagaaaacccgagtagttgtagcctcagaacatcatcaggccagtccactgctgcgtgcagtccaagtctcctgccccatatacagagctgatcacagctgataacaagtccctagcccctagccactgagtccaaggtaacaccatttctgcttcctagaagctaattagccaggctgttaggatagcttgtgtatgtgggttctgtttcttttcccaactggaacggtctcagactcctgatcttctgtctgtggtttactctgtattacactctttgttacaacaacgtttatagagccgttaccctgtggcaggtcaagcccaccccacctcagcagaggacccatgtcaggccatagtagcagagttgctgaataggtgtttgctgggagccgtgtgtgggatgcaatacctcactctcctaatgatatcatcttggccatatcacaggatgaacttgaaatcaaactcagagaaggacagaatctgagccagtgagcagtacatggagggaagtttactaaccccaggtctggggtggccctgccccagtgcagagaaggggctgtggtttctcaggtgagcggaaaccttcggagacttgggcggctgctgtgcttgctccccttaggagattccaccacccttcttgatcagcatccccagacttttcgaggtgaggaacccagtattaacataaattcctcagctcccccccttgacagatgttacgctttgagtagccattgttcaagagtatacaatatgacaaacagctaccgtgaattcagcgctgctttcatacggatttgtgtgcttttagatctttaggcatctgaaaaatagtcacatatacctataaaaaaaagcatttcagatgcagttggtagaccaaacttgaagtacctcagaccttaagttcatgtggcagctaccctcgcctgtccaagcactttgctcacaaagctgaagacagtgagaacaaacaggaacactttctgcccagagtggatccagagagcctcagctttgtcctctcaatctcctctttctccatcagcctcttcaacctgcttggtttgggctttggtggaacagcccctttcttattgtatattcagccactggccccacagtggccttcccacagccagtctgctctcttctgcctcccggtttgaatgtcgccatagctccaatctctagtcaccctcacccctaatcctttatcaagctactccttcaccttctccttttccatcccaagacaatgcatgcagacccggaagtttagctgctctccttgaccataaaaggtgttttctatctagatcagtctcgctggaatagcaagtcaccccatctcaaaacccagtctgaagagaaggaaatgacctccaaagatagactgacagccatgtgcacagagcagtgaaggtgtggtccagcttccagacagcagctctaatccttccagcacttaccaccagtgtgagtctcagcctgctacttagcctccctgagccttagttagctgctcttaatcaaatgggggcagggatcatccagtcctgaaacagggcataagacagactggaagatgtctggcttcggcagaagagggagccagtgagtcagaggcttcaactgttttcttcactcccagttacctgtttcatcaaagtggacttggcaaaaattatcctgccgggtcatttcctttgagggctgtcagcgggaaggtcataccttcctcttcaaaactcacttttctagttccttgtaattgagctgtgactctgcgtttttctattctctagatttccttcttcccccccatcttgccccagaaaggggaaacaggcctttgtcctctcaagctcctctttctccatcagcctcttcagcctgcttggcttgggcttgggtggaacagcccctttcttattctgtattcagccttatgggtcatggccttcagccatgaaaatgctggagtctggcaaactcttcctgctctgtgttagctcacccccctctgtcaggcctccttcatcctaccttagcaatagtgtattgtacataatttgttgacataatgactgtgtgactgagtactgaataataagtgggaaccaggacagctcggggctggcatgtaggattctggggcacgtaagatctcctttctgtttctctgtcaaatgaacttcataatggccaaagtgccaaacagaagtccccagaaaaccccccttaatggcaagaacagtctcctttgttgtttaccatgccagccatgcaccaatggtgactacttagtttcctacagcaaactgacattcccccttctgattctattggtcattagatataatgtttgctgtgcagttcccagagttgagtgtctttctgagcccatcagagcttgatgaacacccccagggtggtggtggggtgctgcgttttataccatagatgaatactcaggagctggactacctgaattcagattgattctgctgatgataagccctggcaccttcagagagctactaaactcttctatacctcactttctatatctgtaaaatggggtgacagtggaacccacttcataaagccagagtactcaatacagagcttgcttgatctatagtgaggactaaagatgagttagttttcacggtttcttctaaggccatgatctctgaccatgagaatgaatagctacagctctgcacacaccatatgggccaccacctgccatctaattacagggccgaatcagtcctgccaaacttcaaaagccaaatcgcttcattgggttagagaccacggccttggtctttgtgaacgaaacacctagactgaagctatccctcttctcccaggaagggaggtcctcatcgggtgcatctgggattcaggaggtgaccttggctcaccagtagaccccggggaaaccatgtaaatattcaggggtccacaaataaccaacttgattgaaatctgtgctaaggagaagcccattgggaaacagaatgtcagggcctggggtagaaaggcaggttgcttctcggcaggtctggggtcagcaagggctccttcttttaagagcccacacgccaacattgtagaggctgtgacgttttctgacctttgtattcagagcctttatctgaagttctaggaagcctgacaaccatccaccatccacacttacctattgctcttcatgtgccatccatcataaatctatctgcttgcagccctcatttttctctcatctgtgtatctatctatcatctaacatttaatctggagatctagcctttattaatcatgtctaccatccatccatctctgtgtctctctagactccattatcagtcatgagttaacacaatgtatacttaagcacgggacctctagtttccagcagagagggcaagagcaactctaggagggatgggtggcgaatcaatgtgagaaagcagaatggggctggataatgaaaggagagctgagacttctcttcagagcagggctggcctgctgggtgcaacagagagaagagaggaagaagaggaagagtttgaaaagccactgaaaggccgctgacgtagagccttctccattctctactacccaaagtcagacagcatcgttcaggatgatcccgtgagtgacaggaaggggcagggagaatagatgggctccagtgtcagggcatagaacacatggtgttgcatccttcccagcaccagcaggagctagaatcctgccttgccctgcaggcaggtgggaagccagaactgtaaggtctgaataggggcatccgccaggagaaacttactactgtaagctcttcccagcaatggctgcatacgggtagctttctaaaaccaaaaccaaaacgctcacgcctagacaccacagactaatcagtcagccctgatgttgaggccagccccaagtatctgtattttgaaagtttccaagtaaccttcatggcaggcacagctgaaacatcaccctataagatctgtgattcttaccacctaactctgaaggacagtaattcccatgaagagagagcgcaggacataagctctgaagagatccagggaggcacctaagcccactttcaagctgaatctccatctcccatggaggtcagtggggctgctgcagggaggacaacactaggtcactccggaagcgttggggccgagtggcctctgaagacctcatccttcttctttctttcttccttcctcctcctctgggttgaggaaccccagagatctttgtaatggccagagctgggacgcaggcgtggaagccacactctccaggccgcccctcttggtgctgtgtaaaggaatgctctggaccctgggcttatatacccatgcccactccagtgagccagatgcaagctctcaccttctccagcacctactagaatggcccgtcctttgtatttaaaaaaaaaaaaaaaggtggaaggccagagggcagacatttaccctgctcctcagcaggcctcatttggtgctttgaactgtgatggctcatggacacaccaaagctatgaatgcctattctttgaggctgcgggaagccaaaccacagctgagaggatgtgaggctcacatgagggtcagcctacaaccaggccaggttgtctgcaggcagtggtagctgcctgggctttatttctccccagcagcaagattcaattttaggttctgcttggcagttagtagagacaaatggttcttagtggtcatatatttcttccccagctctgtggctaggtgtggccctgtcagcattctagtccttggtctcttatcccatggcccccctcctctcttggggaccaccagaccataggccaccccctgtagaaacctcctcccctggctggaacacagctctgctttgtctgtctccttgagagctgaggacaaactggccataatttatgctccagcatgatataaaggggggaaaaggcctattatgctataaattatcccgtgatgggtgaaatgcaggctactgtgccagacgccagtggaaaccccattagacaacagggttcggctgctgagaagtccccacagaacaccgggccgtctgctgtgtgctgtgtgcctgggaaggataatgtacccgatcaaatgtgtaatcagttacctggagagatgactgtgcactgcctgctcagcaaaaggtgacttctagataaagccaccacatgtcccatgctcctgctgggagccctgatgtgcctaattcacagatggaaggtcaagaagagctggcagcaagagaagtgggtgtggcctcggtcacactctccaccctgcccctgaacaggcacagaacctcaaggtttggatctggcccaactcagaacccccattagggactttagagaacacaataatgaaggaaacatttctgctttgctccccacggtctacaaggtagtaaaacacccgcaccttctaggtctccttaaatatgtctcaagctctacccttctggcctgaaaagaagccaagcaatgaagaagacattagaaggggagggagattgtcctcatagcgcggctcaagccacagtgctacacctcagactttctgtgtgactgagagaaaagatcctttctgtacagaccaggtggcctgtggactccaaaacaaagagatttacatcgtgggcacccaggagatttcatatcaagggatcttggcttggacaagactctgatggggtttgagcaatgatcgggaggctaatacctgggaactgagcagtgggtaatgagggccccacccattcacccacttctaggctctgggctggagccctggcctgcacaaagcagggtggttactgggcatttgccaattgtctgggcaaagatggaggaaggagaaagcagagagtgagaactctaagtaatcctatcttctgtcaagaatgacagaagaagcctgtagactacagctccactcaggccacgtggcatgagtcctgccttctccaaagactcagtcggagttcttcggataggtccttacctttcgtgtggctcagtttcctcatctgtactcttgaatagtgtctgccatgcctgtagagcacttacttttatagctgggtcctggtcgctgctgggtaaatggaacaggttctgctgacacagcaggatcagagcaggcatgctcagagcattagaaactccatgacattggagggcagtcctgcaagttttcatcatgtagagacattgagacattgattcccagcctggtagtctccagtgagccacggaaaactaatggtgctaagaatgggacagacagagcctatttgggacctggtgggcacaggaaagggaaatgagccgagtctgaggttgtgtttggttcccgagtgtcaaaggtgaggcttggggctcagtcccttggagaagaagtacttggattccagttgatggaaggagaaggagaaaggggtgtgtatggtatgtatatggtgtgtgtgtgtgtgtgtnnnnnnnnnnnnnnnnnnnnnnnnnnnnnnnnnnnnnnnnnnnnnnnnnnnnnnnnnnnnnnnnnnnnnnnnnnnnnnnnnnnnnnnnnnnnaaatgacttcattgctacttcataactgtaattttgttgctgctatgaatcataatgtaaatatctgcggtatctaacggccttaggcgaccattgtgaaagagtcatttgatacccaaaagtgtcatgattcacaagttgagaaacttggctttagactctgctctcactgaggcaggtatacactcacgcccaggggacactcatttcttcctttctaaggatttttgaggtcattaccacataccctccacctatcaccagtcccagccccacctcaactccaacccccaagactcgctgagcaggggaactcattcactcaggccagcagctgctcactgagaaatctactacatgccagatccattggtcactggccaatgagtcagcccggtcactcattcatggaagagcagagtggagttgggcttcatacagttgctagaaacagaagctattgtgtggaccacaggaaggacaggctctaccttgcttttacactctagctgctgtttggagagtagagagcagggcctggaggtcatatcagagacaaagagcaagcaatgggtagcgatggctcctccatctaaggaggggaagaggacagaggatgaagctggctaaagggatgcaagagaagggggaatggatgctttctatagcttctgtttcctcccacaccaacatcaaacaacacagtcctggagggaaccagtcagatcaaggcctggcactgcctttgcccatgggggccagaggggtgagggtcttcatttgcattccattgcagtctcgtcccagcagcctttgatctggtttgatgtctccttcagcctcttcccaggcagtaagcctttcatcctcaggaggcagttcccagcccagctgcctgtcaccagctctgtcacagtgggggttagggtggagaagtagagcagagaggaaggggggccttattctcctctctcttgggtctctcctgcaagagttcttctgaggtctgccagttgacccctgagacccaagtgaaggggacagccagcatggctggcttcagagggatccgaagccggctttactttcctggtggatgcagggaaactgagaactggctgcatcaccgaagcagtgggtgaccatccaggaaggaggtcgatccctgtccatggccttcctgtgtagaggacacgtctgaggctgggtgctgccactggcagcagtgaggggctgccatggggaatagggaagagatcacaggggcttctggacttggaaatgatgtagtctggcaaccttgaaaactgcacacatagatgcaggttcaatgagttggtgtggtccctactcatccctttggacccatagatgcttgactgatatggcctgggggaattagtggaaatgtcatatggagatggtcagcatagctaggacagagcaggtagaggtgtcccttgttttggctccatccagataggcatcccagaggatgctagggagcctctcagtggtccgacgaccaggagggtgtaaggaaaatctgggacttcttaggtagttcagtgctccacactttacctaacatccagcagccctgtgggtgagcagcagagatggctgctaacaatgacagtaacaagcacttattgaacacttgttctgtgacagaccctgtcctaaagagcttcagaaaagcccagctcactttatcctcacctggctctgctcaggcagagtgcatgccttgtctaaagttacatagccagaaagtatgagaagcaggattcaaaagagccccgtttcctatcggggtgcctagctcttcctgttctgtcaacagtgactccctgtaatccacttaagaaaggttttagctgatccgtaattgatattcacaccctaaattcatgcctgtggggcttcaggggtttacccaagaaggcaccttcaatggggagcaattacacagtaaatgatacccaagagattctggaaagtccagcatgggatgcccctcccccaattccctcccccctcccaccaacccatgctctttgctccgcccagagaaggagtttgcagacccttgtcttgtatgcacctgggttaaagctttgtgatgtctctagttccatcaatggccatatgtggactggtccacagtcttagcatcccctgcctcctgccatcctactcaccagccacataaccagaaaccactgattctaactctcctcctctgccccctcaaccccagggttctccctagcttgtgcctcatcaatatgcatgccatgccccacagcacctggagggaaggggatgagaaaattctgcagcagtaaaaaaagaaaacagcattcactatctgatcgaggtccatggtacccctgcagcactctacccttaagcaggaagtattgtttagcgccgagggtaatgggttaatcagactttgaaaatttaactggaatttgagcattgtcaccaagatattggcatttggcaagttaagtcgctctgttgtcaaccaccctgaccattctggggccaattgccctgtgtggtcaacaatgtgctccccagttgaggctgtgctggggttagactggctaagccaagccaaagcctgaagcgcccattcaagggttgtccttatcgagccctttttgtctaatggtacagcaatgctccagggttacaaactctctggttgtaacaaggacccttccttctgccacactgatctgaagaccaggttagacaaaagagtgcgtgcaggcgtcttcatctctgctcagtcagagattcctgcaaacgactctgctgccttttcacacactccaccagcatcctgggaggctcagcccagggcatcttataggtggaaaaagctcagagtcacactggggctctgagacaataaatctctcgcaggctggaagaaccgggaggtgttatgtgctgcttggcagggagagcagacaggaggcaaatgagaagcaaggtcccagggttcttctttgcaagccctgacaccagaaggaatctccactacatccttgactacactgcgggaaagaatttcaggctagccagagtgacacaaagttgaaagtttattataagggagagcagcatatgtttcagatataagccctggtgggggggaggggggacagggagaaggagaagaggaacaaggaacgttacatactcatgtatagctattgaatcacatgggagcaggtgacaaaggtggccatgagttcccttgactccttagtcagactttccaggttgtaggtctgcaggtcatatctctagcccaccttcttgggagccttctgggcatagcatgtcctctctccaaactagcccctactggcttatagcccagagctactagatgtgaccatccactaggaatccagacatgatgattctctggggcctcatggcacagatttggggtcgataacgcaaaagccttggatccccgggtacaacctttccaccttcagaaagagaaaaactcaaaaacaaacaccccctcccccaatcccgaggcacatctcagattcatttctcaggcacacagtaagtctctgaagggcctgggatgctctgctcagcccctccgctggtggctatacacaactttacttgacacctgggtcctctgacaagctcaagcttgtatcccacggggggctgacatccagatgcagagcggagctgccctctctgggactgtcacctaccttccaggatgccattctcctgcccccagaactccaggcacttctgcacatccaaggataccaatactcctggtttcaaagagaaaaagagcagcaggggcacccgggatctagaagcagagggtagatgagaccttggctggtggtcactacattccagagcagagatgattttttggccaaaaaaaaaaaaaaaaaaaaaaaaaatcagggcagagcaaaccaagaagaaacagcatccatttcctttccctatagcaaaaagaatcccaaataattttgctattactctccactaagcactgttgcccccacccccccccccagcaactcccagaaccatagacaggaaggccacattgctcccattttatagacctagaaaacccgaggcatgaggcagttagttatacagctgggctgcaaggaaattgaatatgacatgctaggcctgcctaggaggtctactccagactcagaatcttcctagcccttgatatgaatgaaatacaagccttaggactaactccatggtaacaaaatccaaagaggaaggaagagtacagaccaataatcctcaggatccagataggaacatctgcattgtgtagcctttgccagagaagaagacgtctggagccagttctgttttgctgtcttgtcactttggggaaaagtgagctagctacgttttccctggggtcatcaaagtggtcagcaaggaggcagcttagcaccctgcatgcttgaaaaggtctccagagaactccatagcaaagggagactcgggcgggcgaaaggacaacaaataagggagaaacacctctggccacagggaagaagcaggatagaaaggcattggagatgaattttaatgcaatcagaaagctgccacagagacaataaaggaatacatgcagacatcaggagggtgaggcgaggaactgagtcccaggctttaaagctacatcacaaaggaggtgccatgcctttctgaagggaggaaagagaatttttaaggggggaggtccagggataaggaaacgacaggagtttagtctttcggaaatactgcccatgaacttggagtccttaaagggcactcggctgaggcagaggcaagcttcagatgctcccaggaagtactgaacgttcttctgtctcaggctcccaccctcctctcaaaggactccttctagtcttcctctctcccaacttcctttctttaaggcagtggctttcaacctgtaggttgtgacccctctcactcacaggagttgcatatcaaatattctgcataccagatatttacattacaactcataagggtagcaaaattacagttctgaagtagcaacaaaaataatgttatagttgggggtcaccacaacatgaggaaccgtattaaaaggctgcagcattaggaaggttgagaaccagtgcgctaaggtttctatccttcctctttctctcatttctacccatccagtttctccctaggctttgcttctgatccttttccttgctgtccctccatccgttcgttccgtaatcaaatcgagggcctgatattgaaggactcgtgctgcagcacagagatctagcatttctctccagggagccatctggagataggatgtgggaggaaagccagacagaaaccaatctcacaggcaaagcagtgagagaagagacagtacaagacagtacaaggcaataggctgtcctagaagaggagttatcccaggaccctccaagcagagcaaacgtcaccaggcaaggttctaggaagactccctatttcacctcattttttgcactagggaagatggggtttagagggaggaacactacacaaggcatcctagatgaccctgtgccctatgccagacgtcagacccgggactaggcttctcagagagagaactgccttctagcaggaggaggcagagggagtcgttgctatctgtctcttgctcctcgctgacaccgacttgctctggatgctctgcactcctcacctcccatcctcccggccactattccgcgcacaccgtaacctcgctgcttccagccaagctcctcctgcccaccccacccacctctgactgtgagctccatccggtcctgcggagcttctacctcaccctcccagttgcttttgcgctggctgaattccttcacctctcgaccagcccctccctctcactccctgtttggctgtgagctccgcccgcttccgccaagctcctcccctatcccccgttgccctccctctctggcctcgcccttttaccggcggactcctccccctccccctcccccctctgctcttcccctggccccggtaagcatctcctaattttgttctagaagatagaaaactcttcgtgggtatgctcaacaagcaacaatctgaggacgacgtgcgccgcctcttcgaggccttcgggaacatcgaggagtgcactatcctgcgcgggccggacggcaacagcaagggtgcgtgtgtgtgtgtgtgtgtgtgtgtgtgtgtgtgtgtgtgtgtgcgcgcgcgcgcgcgcgcgcgtgctcactcaggcctgggaaggatgctcgtgccaccatcaggtggtccctcgaggagaccaagaaggagtggaggccgtgggtctcactgctctgtgcccctttctgtcacggtcttgtccccttcatattttatgctcttgggggggggggggcagggcacgtcctctctgcccgccctgtctctgtccggtatgtctctctttttctctccctgggtactcagggccatggctcagcctgtcctatccccacagggtgcgcctttgtgaagtactcctcccatgccgaggcacaagccgccatcaacgctctacatggcagccagaccatgcctgtgagtgtgaccctcggggtgcgtgcagggtctcatcaaccttaccactgtttttcaagccagaaaagatggggtttaaacttggtacccgtgggtgacctcggtttagtaccccacagaaagcgcgaggggtgggacgggtcagggcaggaactctgggggtgaagactggaacaagtggatctcatgtgccaccctggctgcagggagcctcctccagcctggtggtcaagtttgcagacactgacaaggagcgcacaatgcgacggatgcagcagatggctggccagatgggcatgttcaaccccatggccatccccttcggagcctatggcgcctatgctcaggcagtaagtgggggcaagggtgggcaggggtttgttctggcgctcccgttgccccagccccagagaacagggatgcctacattgttctgtccccagagcagagaatgccaggcacaacgtcagcgagtgtagtctcaggagttaagaggagaatccaggtaggggtggttgccaggaagaggtggggtgctgtccttatttttgaggaggagttcccagagaagacccttggtggggtagccagaaggttcacccctgtaccctaccctcttccaaaccaatgtgaaggctagagagctccagtgcagtaatagtgaggagtttggccctcactccacaaacttgacttacagaggttttccttagttacctctggctggaattgtgaagtgactcaaagcttcaagtacccactcttcccctgcctctgcccccaacaacttgagtcttccacagctgtatcctctctaaaacactgccctcttctgcctccagactgtatccaccatcactgcatggtggtgctgatgtcctccagggttctggctctaaccctgtaaatatcgctctcttcttgagcagagtctagctttgaccgtttacagcagccttcccagtcctcactcacctttgcaataacatttgggggtctagtcacgtttctcttgtctcttctatgtgacaaatttgagcagaaatttaccctgttgagtacatatggctcatccaacaggtctgtaggaatctgggtgccattctccagaacaacatgccttacacagactggggagcatagataagagtgagcctctctccttcaccctgcaaaacgcagatctccaaaggccctactgttccttttaaaaccagccagtcagatcccaggaaagtggagactaaggcaggcaagagagaggcctcagggctttctaggggtagagaccagaagattgtgtcaggtccccgatgctcttcgaagtcggtgtccaggagctaagccccttgtgggagggctgcccctcgggaagcctgtgatattttttccactccctctgccccagctgatgcagcagcaagcagccctcatggcatcggtcgcgcaaggaggctacctgaatcccatggctgccttcgctgccgcccaaatgcagcagatggcggccctcaacatgaatggcctggcagccgcacctatgaccccaacctcaggtgagccagtcagtctctgacctggggaaacaatatcaggacccaggctcaggtatcactacagctactagtgtttcattctatagtaaaaacacatagggtctaggcccaagtactttgtctcaaaaatgttctgatctgtaggtgtccaaggggagatgagatgtgggtaccatgaaatccacaataagatttcagggggatatagtttctctcaagttgttcatcctgggtccttgtctaaaaacaactcatttttatctttattaacagtcagtgtctgggaaaagagaatgacatgaaaacattcccatttgaggttcagcatagctctgcctgtacagtcgccatggcctttctctttaagccaaccttgacgagtggacattttccaagaaactacacaaccagttagagaaccacatgagacatccatggataagcactggaatcaacccatctcacaaaacatggttttgattgactcttggctcttgtccagtacaattttgcctcccacccttagtatatctggcaatgtccacagacatttttgtttgccacagctcataacagagagtgctagcatctagtgtgttgaggccagggaggctctgccacacatctcacaatatataggtcagctgcctacaaagaactatctggctccaaatgactaacgggtcaacactgagaagccatcggctctaagtctaaggatgagctcatatggtaggctccctttgaccaagctttctggctctctgtaccagaccacagcagtgaggcccaactatttctttccaagatcaaagccacaaaagattgagatatctctgggcccaactagaacatcaccctattatgtagttctggtccccaacctcagggacactcatgggactgggaagtaggtcagcctcagctacagtacagagatggactgtttccatcctgtggggcctcagcacactaacattcctctatcttgctatccaccacccggaacacagaatgtgtcatttgtccctaacacaatcatcactaccatgaccaccactattgcttctactgaaggaagtcaaatagggctgagattagactctgaattgtcacctcttcctcagcgtaaggatctagaattctcctcgggttgaagagcaaaacttcttgggagaggcagataagcctgtcacagacccaaaaaggactagccaatcctgacttggctagagtgcacaagagctactgaaaaaaaaacaaagggccaggtgtggtcagagtcaataacactgaggaaagtctgtatgctctaggttcaaggataacactcagtggttagagacatcttcatggggtagggggctctgccttgaacaatgaataatctgagatgaatgaaaacattacattcaagaatttaagccaaggcatagtttgccaccaagatagggtagctatgagggccaaaactgccccaaagccctgggaagtagcaaagtagaactccgtgctcactcttcctcacctttgccacccttgccttctctcttctccaatccctctgcctcccccaaaccaggtggcagcacccctccaggcatcactgcaccagctgtgcctagcatcccatcccccattggggtgaacggcttcacgggcctcccccctcaggccaatgggcagcctgctgcggaagctgtgtttgccaatggcattcacccctacccaggtaagtccttccttccctgagcagtagacatcttgtccattcttccttgactcactgttagaagaaggaatacacaattacagacctctgatcatgccctggtggaaccacagatgtgacagaagaggaccagccaccttccagtttcaggaaccctgtaatgagagaaaaaggaccaaaatcgtaacatatggaatgtcttattatcaataaaaaaaagaaaattctattccagggactatgtacaggaagaaaagacacaggaagtaaatgtacaacccaggtagaaaaaagaggccagtaactacaaattgattaagaacttgagctgtaataactaggagggcaggagctaaaagaataaccacctttagtgataagtaacaaaggactcattggggaaggaactgaaggtttttgttgttgttgttgttgttttgtttttgacggacatctagacattacattccaatccagtctttgcatgcgcgcgcacacacacacacacacacacacacacacacacacacacacacacacagagtcagaacttcggacagctcctgttggacagctcctcggtctgtgttcaggaggtgaactgtgaaaatgaagaccggttctggttgctgattgactttgctcctgtcaaattaagtggaactcacatggcaagagcatgcaactgttctgaaacacttcttctttcttatacaaaggatgacaggtaccagggcagggaagcagagtccctagtcctagactagcataatagagatgtggctgtcctcctttctggagatcagaggaagggagtcataaaagccaagtcttcactagattctagaatttcaggacattggattgtcccctaggaggtcaaagttgggttgagagtacaatattcacaccttcctactccatctttaaacagcacacctgagtatgatcaagagggagtgttctctattgaagatgactagagaaacaagggaagtgagagttctgcagccctagaatgagctgtcctggagaccaagagtcaggaaaaggcctgctgggaaagggcagggttgttaggaggtagacccaataagcaccagaggccaatcttgttagagcccaggggatttggtgtgctgtttaaggatggggactcatgctggcacaggctgtcaaggaggagcttggcctgctagaggcaaaagtgaccctgctaatctcaggcttgtcgcctgggatatgctactgctggcacatctgggtgtcttcttcctccactcttccctgcctctaagcccatctggatcgccaaatccatccccaccctcactcacatctgtgagccatttttctgacggagcttggagacacttctttcccctatctgtaacaatctgccacattccataaacaattccctgacagacccagaagagggatgaagggaaggaaaggagaaatgtagtacattaaaaaattaatttaccatctttaaatgcgtagtttggagccaccgtaatgagcgagatccttcaaaatgctcacttttggcagttactaatgaggtcgttaggcagagaagcagagaggggtctctgcgtgcttctctccaaatgttagccccactcgtttctctgttctcccattttgctcacgaccatgttgaaagtacataatgtgtgcggttttaacggccatgcacaacactgaaagaactggctctgacaagcaccaagagctatctatactttcttcccaatgcactgtttacggagctcctcgcaatatgctgggcactgcctctaagttctgcagattgttttgcacattggcttcaaacttcgtgcagtaagaaaagggcaccatttcttacatgcaaaaaggtgttgcatgggtgagcatctggcaagaccgaaacaacaaaccagatatggcttccactctagagagctcagaagaaagcaaaggagacaggtgagagggagcagaaattagctctgccaaatatcacagcttggaattcttggctctagcctccagcgtgggaaaaatgtagggactggactttgggttgggacagtctcaggcagggaatagctcgcaggattcctgttgaatttcctcctgctaagtaaagccacactttctgtacacacacatgcacacacacaattcctaagaggtattatatctgtcaccttcctgtctctaaagacttttatcccaggttgttctcaatgttcctctgaaccccaggtgctgttttctggagaaaatttagctgaaggttcatggacaagagcttataaggatgtgggagtcctccctactaaaggcattgaatcctgacaggcagttagcctggctgctgagggtcaaagggcacttgatcccaggaggcctttttttctgccacctagggttttttttgtttctttccgacataatggagttggatcctcccagtgtgtggacagttatctccacacatcttcctgggccagacctttcttccagtcaacatcactgtccttggtaaccaagggctgcacacactgctggcccatactttattcttctactgagatcttagcaacaacaagggccagagataaagcaaaacttcccccagcccagcttccccaaaagtcttgctaaagttctaatacaaggcttttctttttctggctccttgatttctctgggaggtatctttctccaagtcctgttggcagacccaagggggaagatttattttgctttctattgctgtggtaataaccatgataaaaagtaacttgggaaggaaagggtttatttggctaaaatatcaagggctacagtccagtgggagatgccaaggcaggaacctggagccaggaactgaagcagaagccatggaggagtgctgcttagcggaatgattcccatggtttgctcagcccactttcttatacagcccaggtccacttgtccaaggatggcactacccaccatgagctgggccctcctacatccatcattaatcaagaaaatgtcctacagacttgcctaaagggtggtctgatggaggcattttctcttttggagctcttcttcccagagctttgtcatgttaacaaaaaactacccagcacaaggacagagtgtcagggtgagtcctcccagagcctttatttcactcgtatggaatctacaagctggtggtgtttgtttgtttgtttgtttgtttgtttgttttaatttacggctcctacattcttttgggaatctgtgaacaaaaggcccccagcctgagcatccctggatcccgatccctcttcaagacagggccatcttgtctccccaccgagaccctcatggtctggcatctcttcccagccagcataaacttctgcatgaactgatctcagccccaccccaggccagcttcacaatgcgcttcccagttagaatgaacaactgtgtatctgctcaaggttctgggtgcagaagagagaaccccaacaagacccagctctcaaggtgcccgtctcagctgccctgtctcagggacagcctgtaataactaggaaggcagcacagccacagtggtatctttgggcactgtggggataggggctagtttggatgagcatcactgacctctactcttttgccttcttgcagcacagagccccaccgcagccgaccccctgcagcaggcctacgctggagtgcagcagtatgcaggacgttagtatcatgcagcctcttgcctctttttctcactgtacttaggtctccacatacctgcaccaggggtgccttcctgtccagatctggtgccagctctgtataaggaagggagtagtagaggctctagatggaaggagggggtggtgctggcagagatactctcttccattaccactgggctgtcctctccctcaggtccctacatggctctgtggcatgggggtggagggagttggtgagccagagtaaaacagcgacatttgattttctgtctgcatcccactgattgccaggaccaaacatgcctggtggtctcgtgctacacagccacaacacagctatgttgattgccactctgtgcagttcctggtctctgacccaggaagcagaggccaggcgggtttgagaggagaagggactctggaagggaagcaagatggagtccagagaagaggcagcaaaatggacaggcaggcagaaagagaaggcctggggccagcaggtcaggtgtcacagaatccagccacactgtcagccaagccacttcctttgtcccatcacttggctgcgtactcttttcatcccttctcagactgtgcccactgtctggcctgcctgagccgcttcttcagtggctttggagatctagtgataccccctgtggatgacagggctaacttcacaaggtcagagctcaggagaagcagtccttgctcagctaagacaacgctccactattgtgggccctatcccagctctaacctcaggctttgtggctgtgggagctgagcagggctgccaagagagatggtcctcctgccctccctctgaccttttccaaccaaacagaacatcaggtgcactcccggggaacacacatctgtactccatcagacagcgttttacttctcaccaggtatcatctgagaagtgaggacaggccagctgtggttgtttcagattagagttgcatgtgtgtgtgtgtgtgtgtgtgtgtgtgtgtgtgcatgcgtgcgcgtgcatggctggtggcccttaccaacactgatctctctctctctctctctctctctctctctctctctcttctggcttcctaccctgtctgtgtctctctgcaccctgttgccatctcttgactttctcggctcttcagcagctgcctaccctgctgcctatggtcagattagccaggcctttcctcagccaccgccaatgattccccagcaacagagagaaggtgagtctctgcccctcccttccccgctccctgaagagtatgctttacccgggcttctcacctctccaggcctctgacaggaccgtggttagatgtgtgcgtgaaagtgggtaggagagttatagggccagaagaagatgtccttgcctatttatacaaggagatgtgcatcctgtgggaagctctgaaaaccaaagtggcagcctggcccaggggcagatgatcagaggccatgccccaggggccagcaagccgttcgcaaggcaccttccccacatcccaccatcaattgccagtggtctgacacagctcacaagtaccgtggtttttaaaaaccaacccttgagaatgggaaggttgttttccttctgcagcaagccctttcagtcactcttaaacaagacctagaagaggttgaggatgtatttgctggtgggggccttgtccctgctccagggagttctcagctttatggagatggagaccacacaggcgcattccctggggtgttcgtctgaggtccatctgctgtgttcccagtgtgtgagagcagagccaggaggtgaagctccagcagtggggcagcctttgcaaccccgagcactgggaaggaaatggtgtctagcctgaggtagtcagggaagtgaggtgccttaggagcaagtagaggacacttgccttccctgacaggtaggatttggccagtgtggagggcagggagaaataaatgctcgtggctagaagggctaagcaatggaggcaggtttgtcctgtacaggatacacataccctcccagtgaccgggaaagaatggcagcactcctagataggccccatgggcaggatgagctgtctgtggctacagtgcaggtctaatgaagagggatgccctggaaggttgtgtgtagttgtcagagtgttggtagagcacgacaggcaagaccagagccttggtagagactacgtgatgtcactcgttgggttctgttccagtaagcagagagccacagaattagcaagagaggaaactgtatgagcaattgtctcagaagccctgcctcagagagctgggcttgagaagcagggacaacaagacctcatcttcttcagtttctagtaacagcgacctgtaacaaaacctgtcccagaagtccacaaggcaagctctattagtttccgaatgtcagatgtgtggtcgctgcagcagattacaccagtgatctggggttttggttactacaaaaggacttttggaacacactgatccaaatcctattggtggaaagattcccttaacagacttgtagcccccaaatgtttgcaagcatgtatttcaaactacaccccctctgggtctgactcttgtattggtcatctcctgcttaggtgactccacacacgtcactctactccatcacttacacagtaaagactgtgaggacaattccttagagaaacgcgtgtatcaactcacttagctctgctctcctgtaccccatgcagcaaatgtctacacatagccctcctccacccagttatcatctctaaaacctcgcaggggatgtccccatgcatcagacagctctgagggccgcaccatcacatttccccaaacccaggacccgaggtctgcggcgggcttttccctttccttatccctgtgccctgcagtagctgagaaccaacttccactgttgagctgggcaggagggaacagtctctcaaaggccctgtttctcctgaagagcctgccttcctgcaacccagaccttcctcagttaagtcagagccacaagggatggaccaggtgatccagccacagagcagagagctgtgcccaaaaggccacatggctcctgttacttgctcatctctcactgtactcagatcccttaatgaatgtgtcttaaaagcctatgaatctccaaatcctgctgcacattcacatgtgcatgagcatacacacacacacacacacacacacacacacacacacacacacacaccacatcttagtgccatactaacccgtcacacatgactgcccttgctaccatctttaaactcaagtctcctgcttcctgcacccttgctcccaattcccattctgtctgccctgtgggcctagctgtggctttcttctcacaatttttccagctctgtgcaaccttagccacaccctgctccccatacgaggccctgtgccacagtcctcttggagtccacaagtcccttccttggagctgaaatattccatagacccatcactttcccctgaccatgacctatgggctccctagggaagtataaggcaagaaggagtggggcctgaatgcagaaactgacagacacatggtgcatacaccgttgggttaggacactgggaacaagttttgggcttggaaggaggaagactctagcacacagaagtagggaggtgtgtgctataggtatggggcatcaggaacaaaagacattaccaagcataaggtgagcctagggcccaggagatgtgaagaagggtgggacagaggcaagtaaagccaggttccactagatgtatgaagcctggatgggaaagaaggctctactccttcagcttcattgcagttgatctcttagaacatgctcagctaccagaacacagtggtatctgggtagatccctcctgccagctcctagtctttgagctgagcttgaaaaccaatagatgcctaaccctgtccccaggctacctgttgcacggatggcacaggatctctgggatgtctatggctgctgctctgcatgggtctacatgtggtcagggagagccactttctatctctgtagctacacgtcaccactgctctgggttggactggattctgtgaatgatcattgttaattctgcggacaatagcggctcctaacatcccagttagggtaacataggagggaaggttcagccacatcttgcagacaggactgagatgatgtctcggaagggccatagaggaatctacatttggagtcagggtcctaattccaaggctgttttcagcatgggatagagtagagccatcaaggaagacatgaagagtatagatgagaacaggaggggaggcatacgctggtccacgggagagacacggatggaagaaggcagatggccctgccatagtgagtgaccttattgttggagagaaaacctctcagatgtggagagaaaaacccagcccgatacagacttaggccactagaagggaaaggctagaagaagtctcagggagctagagtgtagggagaggatctggagtagttctggaggactctgatttagattggtcttcagtggtggtttcttcctccaaggtggccctatcaagggaccatcaagaggtacattcagctggcatgcagtggcaagaacatggtatggttggagcagacaggataaaagaagggcccaccaaagtttgggtggtggaaaggaagcacacccatgcctggatctaaatgtaccatctactgacagagggtctaggaggaggggctgctggggacaggaaaggtcaggagcttagcaggtggctttcacaggcaaaggaatcttcttctagctctgggcctggaagtagtggggtagtcagaaagaggcaggcagtgggagggcagaagagcatccagggccagttatgtgtccccatgctggattacctggcagccctagtggtcctgagtgaggaggacaatacattttgactgcctaagccacgtagcttgtagcaagccatgttggtatttcgtgaccgtcactggagttcatgtttcgacatcatccctgaagtgacctcaagtcacctcaaagtctaaaggatccatggcaggtgctttttaagatgacaaaacacaggctagggaagatttccacttacgcagttaaaatttatcctttgaccattgtaaatgaacagctttatctgcaagttccaggaacacaaagtcccaaagaagcctggaaggttagtgttcaggacagataggcagaaagtagagttcacattaggaaggccacaccctgaaggtgcatatcctggcttcaccctcttcctcctcctcctccaccacccccaccaccaagatgtcttttggcagatggcttaatctctttggaactcagtagtagtggcagtgtagctaagccagaggatgccgcaagggtggggtgagtcccatacaaagtgcttaggacagcccaagggtgttcctagggtggaagcgtcctgagtgctgttcgcatgacaggaggcagctccggggtgccctgacagccgtggagcctgaagctgtttctgtgactcgattgatcgggaagggaaaaatcttgttttctgtcatcaagactaggagggaatataaggtgtggactatggtagccgggcctttggaaggaaactatgtgaagatggcagaccaggcaaagaactgggcctatgtaccatcccttaagttctctggccagtctgagctgagcctgagtgggagagaaagtgaagtgtccccagcacaggatgagggccattttctcagccctccccagaacatagactgggcaggagacaatatccaacaactctgtggtctttcctcagcaccccatttctgggcagacagctgatctagtcttggcatagtcacccattctctaattgaccctgcctgccattccagccccagagctgctagggtgcccactattgatgcttgataaaagaccacctaggcacagaaagatcctgtgacttgcccaccgccaagtggagattagagctaataattagggcttagtaaacgcacccccattctttgggggttgtttccttaaagcaccctcaagccccagccccaccctcccctccctgctgcactgcctaactcgctcacctttcctctgtctctttttcccccccacccctgccatcccccttccctgcccacccctcccctcaccgcagggcccgagggctgtaacctgctcatctaccatctgccccaggagtttggggacgctgagctgatgcagatgttcctccctttcggtaatgtcatctcctcgaaagtgtttgtggatcgggcgactaaccaaagtaaatgctttggtgggtaaagataacaaaccattcagcttcacctaggatgggggctgctccctccgactcctcctgctccttcacactgccccaggtgctcctgggcccagcctccatctctcagtccttttcttctgctccgctcttcctctggcttctcagctttctctacccacactcggctcccatctcacagctcaagaaatccctttctagccccaaagcccagttcaagccaccgaggaagggaaggggtcattgtggttgagggtgcggggatagcatgcagagccagagagcacgactcatcttcccaacagcctctcatgctcggagtctggtttgagccccagggtaaaagccggtggtccaagggcagtcagcccaaggaggccctagctacctgcctttcagccatctctccacctctctgtcctgccacctttcctatgcctgccctgttccttgctcccttcatgccatgcagtgaccccacccttacacccaccccaggccaccaaagtgggcattgttgaggagccaggaggagattgccccccaggaagtctaagttctgagcccaatagaaaccacagctacttagcagcatcagcgagatggcaagcactgaggcagtgaggaagtcagagaaggctagaagggcacgtggctgggatgaaaagagggagagggcaggaaatgaggctttgggagacaaggggctcatagtattagctagggagggctacactagacattgccattctgtgaggagtctttgattgggcatattatgttttgttttataaacttggtatccttatccagaaaggtccagatgttagggcatcctctcttgtgcttacacctcttctttcaactccttcttggtccatctcgcacctttccattgactccatcagagcattcttctagggcaatatctgcccacgagtccccaagagtatggaacccacagagtgccttgcatagagccagggatgagtctgccgaaatgtcatgttgactctcagactctgggggtatggggacagctggggcacgtagggcatggtagagggaagcacagagtagagccgcaccaggcagcgttaagtataaggacttctcagtacggaatcatggacatcttggggactcagggtgtgttccctaggagagtgaagatgttggcaccattgtacactctcatctgacagctgtcacaggcaactcatgcttcttcaatccagagttgtcccagtgtctcatttctttttggctataaaaacaaacaaacaaacaaacaaacaaacaaacaaacaaagaggaaaaagttatagctgtgtttcttgctacttggctggcattgtttgtttgtttgtttgtttgtttttcaagacagggccctggctgtcctagaactcactctgtagaccaggatggccttgaactcagaaatccacctgcctttacctcccaagtgctgggattaaaggtgtgtgctaccaccacctggctttttctttctttttccttttttctctttcttttttctttctttctttttaattttttaggcattaagatgatgtatataaagcccaactggaaatcacttccatttgtgctttacttcacaagtgtctttacatcacagatatcacataaagagcacctctaggagcctctagacagagcacatctgtcttactgcctgtccctctggactcagcccagttttcaaagttatttcctgagcgtctattcccaaaactactcctagtccctaagactagttaaggtctgcaggaccaagttttcttttctctcttttggaaaccctcttctgtacacctctattcaatttctttttcccttaggcttccatcatgctggtctagcctctgctcccccttaagccacttgggcctcctgagtcaaagtcctctgcccttcccttgcccttccctcatgggcaagtcattgaacactttgaaccgcagtgcccttgtccaagaaacagggatgttgcagttatccctaagggatcctgtaagggtctatgagactgttaatgactaaagcttggcagagcagaccttctgtaggtgccacagccccctttcttatgaagagtgtgtgcccgtggtcctggtcctgtggtaacctccactcctggggcggggggctgcataattagcaaagcttcatgaaagaatgcaatacacagatgtccctaccttggaaggagaccatcctacctctgaggcttttcggttttaggaaggcaggaactttttaagggtggaataggaggttctctggcaaaggaacaaaaacaggacctagtgcccagagctcttctcacaggggtgcccaggcggcaggcagactttgccctgactgcagttactccattctggatgaggagggtctctttctttggctcagaaacactctgtggctcccagaaagcgcttgattccccagggagcttggctgctgcaaacttctaccaagcaggtggctactcctccttttggtttcacccccagacagctctgagcttcttctctcagttttgcccttctttctgtcagaaagagccaccaaacctgagtgcccaagtagagtcagtaccaaaggtgcccatggagaggtagagaatgggcgcactcaggcagggacagaggctcatctatcttccttagtctgggggacagcagtgaagaaagacttacactcctcacactgaaaactgctccggtttgcttagcacctgactttagtcatcagacacacaggtcagtggagggagacataggggatatgtaactggaggctgattaattagtcagctgatttggtgtaaacattgatgctctgtttgtgctctgattctgactctcatcatttctgcatgcagtgtgtccacatacgcacaagtgagacacacacaccctcttcctccatccttcatgatccacggctgcatgagtaaattgagcaatgcaggcaggagacaagaggagagagaagagccagatgcaggcagtgtctgtggagagagggagaagggaaacagagggatcaggagagcgagatgaaaaggtcaggagagaaggtgtagctatgttagcatgaagtcaggggcagggccaaggtacatagcaaacacccaggaaagcagcggctttgcatggaggtctggccacacaatgatctcttacctatctcacagccaagtggagacaagcttgctctgtgtatagcctgagcatgtcagccaagctggatttcaagtgttagaacctaggtccatttgtacagaagaaatggaatgaattaaacaaggccctgaaggtttatttcctggagagtttgtggcaagagggcatgcgtttactcgatgcccctcgttctggtccctagaggcctgactataggcccgcttcagaagcccttttcttaagggcccatggtgtctgtatgaggaaataagacttcccaatttaagccacaatcggtctatctgccggtgttggttagcagaggcgcagagcagaacggtagtggaaggtgctcgacatccctaggaagtcgtacagcactcatcgcgaggtgtgtgcttagttaggaagtttcccacagtggcgagggctgcgcacagccccaggggtgaggcgggtttggtgggggtgaccgggcggtggagtggcttccccgacgttcctccctcccggccctcgcactcctctctctccccaggccggcaccccgtgccctcccgctgccaggccccctcctgtcagggaggacagtgtgcaataagctcctccgcccgcaggtgtgtccgccctctcccgcgggaggagagggccgaggtggcgggccggccggggtggggggtgggcgggcgccggcgccaccgggagccgaggagcagccgagcccgggccggggcgccagnnnnnnnnnnnnnnnnnnnnccctcccctcccctcccgcctgcagcggccccgggcggccccgtggaaacccaggccctggtccctcgtgtctcgccaggcttcgtgagcttcgacaacccggccagcgcacagaccgccatccaggccatgaacggcttccagataggcatgaagaggctcaaggtgcagctgaagcggcccaaagacgccaatcgcccgtactgagcgccggcgggagcgtcccccgggggagaccaggactcgcacaggtaaccatggcggctgggcttagggacgggaggtttggatggacccgtcgccttctgaggccttcctgggcccggccctcacctgtgccttggacccgatgcgccctgatcaacctactcctggctcaaggtccgcatcacaggcatagaactaaggccatcctagcagaaccaggattggccgtcccctccgcctccaggccaaaaggggtagaagtgaggaacctctgagaaagagagcagcgcctggggcctgcgccttcagactctcattgtagcccagttagccagggaccctaggtgggcagatggcaagttcaggccttgcggggaggaagagcctcaggttaagcctcctcccagtctccctggctcttgcatgcccaggtctattggaagcgagcttcctccttgactccttccccagtagctgccttagcttagccaggacaggaggggcaggtatttttcaaaggaacattagcaagaggaaacacagcgggaggacacacagtgttggaagtttgggaaccagacctggtctgcctaggcttgacctctatttagccttgcttgacaacttgaggcagttagtcccacttttggggttaagtgttctcccaggcagagcagatgactccaaaaggaactgagggaatgctccaggccatcaagtccacctctgcctgtcccctgatgttactcacaccagtcagcttagtcacggccagagatgaaggccacattgggcctcttcttgctcaggctgttccgcccagccctccttttatttagtgcctccggcactgtgttggatacacagagttggagctagatttcctggtaagtaggtaggtacagggatggtagctgaactgaagatttcgaggccagcctgagttgatattagagatgagtggcctccctctggggtaaggtcaggggcaacatgtgtgaggagcaagcagagggctaagggtgttacagggagggctgagccgagggagcaacccaggggagaggacagctactgcctggagcctgcagaccactgcatgggctttgtcctcctctgaaatgggaaggggtattagagagctggggtagtctgttattaggttgatgctaagctgtaagggctgccacagagatagatctgttgtattgaccttagtccggggcagatcagacagtgtgaacgtttagacacattttgaaggtagagccaaagatgcttcctgacacattagaaggtatggaagggagagaggttacacccgggattcagccatagtgacaggagagcagagagtctgtaagcaagactgggcatgttagagttaaggcctgcaagtggaagttcatggccaggagcatgggaggagtctccaggttctggtctctcctataatggcacacttccctacagaggtatagatgccagaagaccctcctgtaccagctgaagcaggggtcttttccctctgggtgaacattagcccagtcagtaatcctgaaagagcaaagctgactctggcctccttactccccagccctgcctatttctgccttatgtgtagattggggcatggcggttcacagactctgagtaccattttgtgctaggcattagactcaggtctggggatacagagatgagtgggttacatctcagaggaatagacacataggcaccaagatgcagccaccagatggatgtgctcccagagaggagcgcctcagtcaggaagctccaagctgcatgctaggcttctacttcctcactaaggaaaccatgatttagtaggcgatcagatgatctgaaggagcatgtaggtattttggctagcagctcctatcctaccctatggctcaagcaagggtaatacctctaagtcagaaattcctagaggaagggtagaggaaggcaagtgtgctgtgtgaggcatgaaataagagggctacagggtagatccagttgccactcagccttgggaggccacgaagatgaccatcacagactttcgtataccaggcattgttctgacaagtaatgttggtaacaagtagcctatcaggggggaagtgtcagaattgctacctcacagatgagcacagtgagcaatgaaaccaaaatttgaagccaggaacctagtttcctttcaagtaaggcaaatgggagactactgccctccttcatcacggctctgctcacccacagtacccagcttctttggagccagctttctctgaacctcttccctagggtgggctgtcttaagctgtgataggacataactcctatgatcaagtttccgtttagtttccattcagatagcatttaatgatactgcctctgcaacccaagagtgtggaagctgtggtaggagggttctaagagaagatggagctactcaaggcagctgaggatctgccaacacacacacacacacacacacacacacacacacaaggatggaattcaaaagaatgtggtatatcataagtcaatagggggtgttgataagtgatgacatatgtaagctgtagctattccttatcaggagagggaagcctgagtagaggcttgagagaccaggtgaagctgggagcagctgggtagtgaggtgacgacttatactagtagtaaggtgggatgtgcaagcgggcttgatggtccaaggccaagtcggagccactttgagacatatctggggaagaaagattcaggcagagtagctaggtaacatggctggggttggttccacagactgaggccccagtagggtagggttgaggttggggacaacaaggctcttctccattgatggtgtcctgtctcactggctgtttgggccttgtgtgtgcccagcctgggcaaagctagactatagcttggggtctgagtcatctatggctagagtctagctattttagatggtatatatgaaatggtcttgcctggttcgggtcaggaccctattatcacctccagggctctgtgctctgtgagctacccctcctagggggtggatacacaggagacagtactttgtatctggtgtagtatagcagaaatgagggctgcatgagagttccctgatggagttttgaaaagagaggctgtatgcattcttgtctgagtccacatgccaaggataatgtctggcaccaaggaacagctggccagaagcaggggagacaggaagagcagagtggggatagcaagttttggctctagagccagtgtgtcttctcactgtagttgccagagctgatttccaatggcaatatactccttagttcttaggcctctcctcatgccaaaaggacgctatagccaagcactctagcggtgaggggacattgaaggagcttctctgaggggctgtaagtgccgaggaggatgacaatcaggatacagtggtataggaaagtaagatctgatgctggaatagcaaggaacccattgtaagctgacaggcagaggggttgggtggtgcctctgggaaggccgagctggaggccatgcgtggtcccagttgcttggtcagctcatctacagtaacattgtgagaagctaggcttcccttccgtctttaaggaaaccaagacagagataggaagtgcattacatggggctagtgggttggagaccctagagacaaaactgagatgtgtgggtcttggcacaggcttgagtgctgcagagaaacagggaagacggagcaaactcagacagcagatgggagctggggcagggtagatacaagagaatcgcagaagtgagcctcactgtggttcctttgtagggttcctgctagggagttgggacattgagaaagctgccagggagagtgttgagaaggcaagggttagtggggaaatggaggagaggtccgcagagccaaggaaagagcaaggctagcatgctgccttctgcagccccatcctgcagctctctgggtcagagctgcaggcctctctgaggacttcacagcatagaaacaacctcggcttggccagctggtgggcgagtcaccgtctgagataatcaggacagaaaactgacagtgcacagaccattacaggatgtcagggactttgataaaatatcttctaaaccaaagacactggttggccagagcaaagaggtgtgaacgtagaggtgcccctgccacccagagacaccccttctgaggcaggatctagagatgggagggtgctgtccatgcagactccactatggtggcaaagtgccttaggtgactcacctttcccacccgcacagtccaccagggcacagtggctcccctgcaggccctcaggtgaggagagctctacatgtgggggagaaaggaccaaaggtgttaatggggcttgctccccgagatctgcttgctggctacagtggtgtgaggggctggtagattttttttctggcccccccttcaccaaaaatgcctgtacccctccctcttcccaacgcatgatgggtgcccttaggggccctgtgtgaggttctgctcctgtccatggtgtgccatgtgtctgcacagtagctgtatgtgtatgtgtgcgttctgtgctcatgtcctgcgtctgctggcttcctccatccctttgagttccttttggttcccttatgatttgactgctgttttctcatcagctttagactgatgctgtggtctggtgctgtataagtattttttccttttgattttgttttaaattcttccttccccttctttaccctcaaccctcccctgacctctcctccccctctgctcccacttgcccttcccctcccctccctcccttcttcccacactctcttgatcccctctctctttctctctctctctccatatataaatatatatatataaatcttttcttcttttgtcattcaaccaaattccaacaacccaaccagggccagtcaaatccaccacagtctcgcgctgagctaggaataaagttcacgtaatcacatgagagtggagaaaagtcccccatccgtaagttcaaatcaactcaaagttcacagtgtgacatgatggcgtcatgtaacaaggctaaggatcggttgcatgacacttgccgtcaagtttcgtggaggtgctgtgattggagcgttatccttggatgtcgtacccgtggatgattggccagtcatgatcacacgtgcattctcttaacccttgtgctgccacggtctctttgctgtgctcattttcgttttgttcttggtgcctgcagtggttttagtttctgttgtttggtttttcttgttcagcatttttatttttatttttttttaaatgcttctctagatgtcacatagagaaagaaagaaaaaaaaaaaacccaaaaacaaaagaacaaaaaaaaaaaaaaccaattagtaaaactaaaagacaaattcctcaattatcaaacatgggatcatttaactgtataaaccattctttttttttcttaaaaataaggaaaacatcttaaaatatttctgcgtggttgatttacttgcacttgaaaatattgtgattttatttttttctagaaatttgggggcctttttcaattgacactttcctaggtttggtctttttttccagttagtctattttaaatctcacctaaaaggaaatatgaaaatcaaaatatctatagttaaaaaaaaaagataaagaaagaaattctaagccaaaaagctagagtccaaagccagaggtctctgagagagagcctggtaaaattgtaaggtttgtattgtagccacttctgctaaattcagtgtggggagggaagggtggccggggacatgggagggtatttttggttggtctggaagaaacagtagcaacaaagcaaaatgcatcttttcatttacaactgaaaaagggtccttgacaagtgttttttttaattttattcttattttctttggtgttgtaactgtttagactgctgtgtacggttgctgtttgttgaatcaacagtgtgaaaacctgccagcatggattgatacacgcatgacgttgtcccctccagtaggggctttgcagttataattttcttgatgtaaccagtcacccccatgtataagtggaagctgcttgctagaatggagatgagtctcatttgttaattcacgatgatgaaacattcgccttctgattctagtcagatcatgattttgtttcccttcaaagcaaaactaaacaaaaaccaccattggaaacaaacaaacaaacaaacaaaaaatcgaagaactgtttcagttaacatatttaagttggagaattaaatctattatgacatttttttttagcttctcccatccaatccctgaaagttctgaatttcctctaaattccctggcatgtatgagaacagtattatgtatgtgcatatgtgtatgcatagatgcatacacatacacacatatccatgtatatacacatatgtgcaggtgaatatgttctacacatatatccagatatacatatatatacacacacagcctcgcaaatagtactaacctcggggaagaagtggctggctagaaactgggcaagaatttggcaaaaattgagaggcagcgagccatttcctagtttttctcaagctgggaaggagtgggctggcctgccacattactgctatcttgtttgctaggcttctgtatacatatggtatctgggataggtccctagggacaagtttaattacaaatttatattccacagtcccaaattctccccttagatctagcagtccccttatccagaacccttcttaagggagccaaatcaagaattcttttccaataacttaatcccacctataaccatcgctactagattgcccagtggttttttagtctgaacagaagaacaaattttttttttggctgtatcatgatcatgactaattctcatactggtctctcttccttaccacctaccatcccccagaaaccccatcttccccagaggcaggatcctattggtgtttggatgcattctgtgttttcacacgtggcttaatcagtactgatcttcttcattttagggcaggatgctgaacgggctacattaaaaacaaacctctttctctctctatttataaatgagaactgttggacgacacctttgacatatcagccaataccaatcaagctgacgactccagacactccgtgtgactgtaacatttcttcaaggaaagtatagcgtctatggagtgcagagggcacgtgtttggggaaaaatatacatgacataaagatgacgacgaagaagaaaaatgatataaaacaaacaaaaaacccgcgactttaaaatgaaataacgtgagcccagatggggaagctgaagggctgggcactaggaggagatgctgctgccaaccgatcctggggcttttcccgcccgtaggcgcctgaggcaggcaggggcaagtgtacaatggggcctagtccccagcaggcggctgggaggccgccactgagcatctctatttgtcattcctttagctatttagggaccaaaggaccaaactttttattgcagatgtgtagctctgtcaattagaggtggaatggagaccaacctccttcctgcctcctggctgttcttgaaacagcttagagcgattctatgaaaatgtaataaaaaataaaaataaaaaaaaaataaaaaaagaacaaaaaaacaaggaaaaaaaataatgcttcaacgcttttaaaacagcaagatactagttctttgatactttgagaggcgctttgattaccccgattgaagtctctgaaactttcctatggttttctgtattatatgtctggatggagctgtttagatacattgattggtggatatttggagaaagcaacaaagatattaagtcattaaccatgaagagaacacgaggggaaccaggggacttcgaaggcaaggtaattgttgtgaaaagtctgtaaatgcttctaattcttcccccctcttaaaatcataatagttgtacagaattttaaaaggaaaagtttaaaatacctatatcatagaagaaaaaaaaattagaggaaagcaaaaaaataaaaaaaaaaaaaggaaaaaaaaaccttatagaagttagcattatgctaaaatcccagatgttgtaggactgtacttctgtagagtttagactgagcatcgatcccgtctccccgcgagtgctgtcggactccgtccccaagggccaggccggactgtccagacctgcaggctccggccagaagcgccgctccggaagcgtcctgccgcctctcgctttgccagcctgggagccgcgcgcatgcgcgctctctctgcccttctcacctctgcttcactcgccttctgtgcttgttccggagactttccaggccagggagaactgggaacttctcatcttcaaacaactagacaacacacacacacacaaaaccttaaacaagagagagaaaacaaacaatctttgaagaatttctgaaactgtttacaaggaattttgaaaaacagggatgtttaaatgatgctggctctgtttttctgtaaataaatttgcatattttgtaggacttttaattgtaatgatagagaaaaaacaaggaaaactatttaatgaaagcacgatatttatctttggtaaatgactttagagcagttaaagacattgcttaaaaactcagaatcagaaaaacactgaattatttaagaacacatatattttaaagtataacatatttattataatttatttgcaccttgggaagacttgctttgcattctgcctcaagagcttctcattgatgtccatctggaggccaggggggtcttggaactaccattttttttttcctttagatcaacaaaattctggttgccctcaggcctccttccttttctttccatctattttgttgttgttttacttcatttagttttctttttctttctcttgactcctccttttaggatgtccagatgttgtaaaaaaacaaaaacaaaaaacccaacagctgcagttcaatacaactgctcttttcacacgactccctaaactccttgtaaccttctgtaactattggatgacgctttctccagcttagccctaaataaagcacagtttaaaaaaaaaaaccaaaacctcaaagagtccttattgctctgtgcttctcaggttcttttcagttatgcttcaaggcttcaaggtctgtccaggtcctttctcttcctagggcctgccggacaggttctcactgtgacatcatcaatgtgtgggaacaataaaagccaggcctgctcaacttaagaaaacttcaagtggcatatctcagtctccactgcaaatccattttggtctgggcttcctgagaactggtcacagggcctcagcacaaatagcacagccctgctctcctttctgacaaaaggaaaggaaggctgtctgatctgaagatggacctgaagttgggtgatgttatgcctcaggggaggacacagtagagggaggggacacaatgccagctttgccactgagccttttgctcttggtcctgcactcaccagggcagtttgcctagatggataagacaggaatgtgacccttggagtccccatcccaggaggagtgtgtaggaagaggcactggaatcttgctctgggacgtctcttacaagtgctttctgttgcggtaaaccctcaacccactaaagcccatgcaaaagtatccagttcagttatgatatttataagttgcacatctagattggacagatctaccactgcactactctattcatcacctatgagatcccttgctacttgtggcttctccaggccatgtggttctgctccatcttccttccatgtcctcttcttcatcttcctgtcttcctcctctccttcctctcttccctcatcctctaaaacctccagccccacctttcccttcctctgcccaaa

SEQ ID NO: 800 - DNA, 1162 bp, Mus musculus
gcagatgaaccggccgatccaggtgaagcctgcggacagcgagagccgaggagatagaaaactcttcgtgggtatgctcaacaagcaacaatctgaggacgacgtgcgccgcctcttcgaggccttcgggaacatcgaggagtgcactatcctgcgcgggccggacggcaacagcaaggggtgcgcctttgtgaagtactcctcccatgccgaggcacaagccgccatcaacgctctacatggcagccagaccatgcctggagcctcctccagcctggtggtcaagtttgcagacactgacaaggagcgcacaatgcgacggatgcagcagatggctggccagatgggcatgttcaaccccatggccatccccttcggagcctatggcgcctatgctcaggcactgatgcagcagcaagcagccctcatggcatcggtcgcgcaaggaggctacctgaatcccatggctgccttcgctgccgcccaaatgcagcagatggcggccctcaacatgaatggcctggcagccgcacctatgaccccaacctcaggtggcagcacccctccaggcatcactgcaccagctgtgcctagcatcccatcccccattggggtgaacggcttcacgggcctcccccctcaggccaatgggcagcctgctgcggaagctgtgtttgccaatggcattcacccctacccagcacagagccccaccgcagccgaccccctgcagcaggcctacgctggagtgcagcagtatgcaggaccagctgcctaccctgctgcctatggtcagattagccaggcctttcctcagccaccgccaatgattccccagcaacagagagaagggcccgagggctgtaacctgctcatctaccatctgccccaggagtttggggacgctgagctgatgcagatgttcctccctttcgcggccccgggcggccccgtggaaacccaggccctggtccctcgtgtctcgccaggcttcgtgagcttcgacaacccggccagcgcacagaccgccatccaggccatgaacggcttccagataggcatgaagaggctcaaggtgcagctgaagcggcccaaagacgccaatcgcccgtactgagcgccggcgggagcgtcccccgggggagaccaggactcgcacagg

SEQ ID NO: 801 - protein, 370 aa, Mus musculus
MNRPIQVKPADSESRGDRKLFVGMLNKQQSEDDVRRLFEAFGNIEECTILRGPDGNSKGCAFVKYSSHAEAQAAINALHGSQTMPGASSSLVVKFADTDKERTMRRMQQMAGQMGMFNPMAIPFGAYGAYAQALMQQQAALMASVAQGGYLNPMAAFAAAQMQQMAALNMNGLAAAPMTPTSGGSTPPGITAPAVPSIPSPIGVNGFTGLPPQANGQPAAEAVFANGIHPYPAQSPTAADPLQQAYAGVQQYAGPAAYPAAYGQISQAFPQPPPMIPQQQREGPEGCNLLIYHLPQEFGDAELMQMFLPFAAPGGPVETQALVPRVSPGFVSFDNPASAQTAIQAMNGFQIGMKRLKVQLKRPKDANRPY

SEQ ID NO: 802 - DNA, 342657 bp, Homo sapiens
  misc_feature (1)...(342657): n = A, C, G or T/U
ggaaatcagcaggccggcgatgcgggcctgggcagcgcaacagacaaggctctggggacagcttaagtggacaataattgcaggttattatataccgggctgcagccaaaagccaggcagctattaagtgtgattgggagaaataatccggaggaagaggatggatgggagagccaggccgctttctctgttccaggcctgttctgaggctgggggctgtgcagagacagggacagggtgggtggggagaggagcttattcacagcataagcaccttgcactctgagtagcaagtccaccctcattcctccccacaaggtatgcagagcaaggatatggtccccatctcacgaatcagggaatgaggtccagaaaagggaagcagtgacccaggatacagggcaagtcttggctgagtccctccagaacccagatggagctccttttgttgtttgatgaccaaatacagaatccactctcccgaggcaggaaatgcctcagtggggcagccttgatgttgagcagggactggaagcagagatcaagacccaaagtgggcacagatcccatcacattgctgcctgcccagcagacaagatgatgggagaagactaaaaatcggaggagaggcagggttatgataatagggttacttctcagagctttatctattcattagatgcttctctaaggagaattttctgcccattttatagatgaggatacggaaacaaagaacaatggcatggcttgtccatggcaaggcggtgatgttgtagttcttgctggtctagggacctgcacaccccaccccagatctgcctattaagagaagcccttagcagaggtgacctttaccctgccctttgccaccagcctgggaggatttgtggttttatccttgttagccggggtttcccatttcttcaggaggagaggtggctcttttttgggagtaaggatggcctggattgacccccacggggtaaagctgccctttaatgatgtgtggatcacacatacctaacttcctactctcacaccctcagatcttttaagcccacacctcattttggaaacaaggatgaggcaccctagtcccagacacacaaagaccatgggcgtcttcaaggagattcccgaagaccaaaccatcccgttcattatttaaccaaggcagcttctgtggagatagccctacagtgatgggaacatcagtggaggggatatatatcatgggtgggtggtggacaaccctgactcctccaaacacaacacctcagcagacatccaggagcgtcatgtaaaaggctcagagccatcgcaggttctaacagcctgtccctccctcctgggatcaactctcccacccagcagtctcagaaccccagcctagattcagcctggcccaatgaccctgctttgggtcacatgagagtagaaacctggcgcagggagggatcaattacactgtgactcagcgagagggaacagggccagggagtgagtcacagcagcgtgcccaccctccctggcggggaggtggggggatgaaggcctgtgtgggagcctccctgtgtcaggatgtgcaggtgtgtgggtgcaggctcccctgacaatggaggcagggggtactaggtgtttaccacagggtgagcgcctctctgagcctgaaggcaggtgtgcatcaggaagctgcggcattgaaagaaactcgtgggggctcctacctgacatgggcttctctccctcacaccctcacacaactttgcccccaactggagatgtcatccacttgctgtaatgtggaaggggccaaactagtttcccattatggatgtctttcatttccctaacaccacttggagggccactgaggagaaaccccaaatatcgtctttcttagaacatctccatgtgctattatacatattccaaagttattttctgcaatggcttatacctggaaatgagtttgttcatttaacaaatacactcataatcatagctaacatttattgggcacccaccatgtagcaggctctatgtacgtattacctcttttagtcatcatgacaatcatatgcactgttatacccatgtttctgatgaggaaattgaggctctgagagcatggcttacatggctggtaagttaaagatctgtctggtttcaaagtccaaactctttctaaaaacaatgcgtgcacctatgcacatatgtatataaaaagtacagtaacttaagtctgatatatacatttttaagcaataaatatccaactgtatttacagactgtatttctttaaactgtactctttgaacaaaatttatattaatgtatctgtttaataagacaccaaaatgtatatatacaattccatgtacactttggaagactttaaacttactaaaagaagaatgccatctagaaattattgtgggggatatggcaactttcttgaaaacctctgacatctcttaaacattcctaatggcagcaaattctcatcctttgagagcagaaatgatttatggaaaatgggcccaatatggtgaccctccccctcagcatatgtgtgttgggggtcagaggagtgatttctccctttgtatccttccgaaatacccaggcatcttctttgtcctggtcttgtactgttgattaccctcttctgtgttactatcagccagtcagcatatggtcattgagtccccaccctgagcctttcctaagagctggcccttctgcaaacccccaacccacggccacctgccacccttggaacacaagcctatatccttccatagctgcagccccctacttgactgtgcctgtgccccctccatcctcagcctctccctccctctccccaggccatgaagtcaagcacccagctcccgagtgagtgaccaggagggtccacccagctgggggagtccgaggtctccagacaaccaccctttaaagatgtagcatggtgcaaaggtcctatagtctcaccttcctgagactgtgtccaattggtgtccccctggccccacccagccacctcactccttcatgtcacatgcacagcctggaggcattgcattatctgaaggattgtgtaggagcctggaggcagtggggaatgttaggattagagagagcccaggtagaaactgttgatctaatggcattatcagagaaatcgtggccctgctgaagtgacatttacccatagcattgtgtgtgtaataaatacaacttcctattccagtttccaaagtgagcccagtgcctgaaaacctcagggctcatgtacaataaattaacataattaaaaactaattagtaaaacatcacaattaaaaggacttgctgaggcaacacctctcaggtaagaagaagggaccaccagagtgctggcagctactacgcagagcaggtcctaagaagaggctgtgatgcaggacttactatcccagaaggcctccttccccaaggggcaccttgagaacagttgagcagcttgtaaggacacccacagcatgtccatctcaagtctggacaccaagtccagccccagccagaggtggatgcccctcctcctttgtaggaggtgggagggggcttcagcaggaccccagcccccagtggcctgttagtgacactgataatattggctggccagacattgatctaagcactttacctgcatttactcatttaatcttcacaacacctctatgaggtaggttttatttctctttttattttacaaatgaggaaactgagccacaaacaaattaaacaacctgcccaaggtcacagagctaaaaagtggaagaggcaggacttgaagccaaggagtctggctccagagcacaggctctgccagcttcacctaaatgcagctaaaaccacatgcttgtgctggatggagcactgccctttaaaaaaaaaaaagtcaattctttggggaagataaggagtaaactcctaacccctcagtgcaattaagttcatcaaatttatctacattcttttatagcccatttagaccctcaatccccactcttgtcaccttaataatttttacatgaaaactgattagtcagcctcacagacgtgccactgtctcatcttttttggatgtgatatgaggaaggaaaggaaggtggaagaaagggaccccagtctccacttgatagaagagaaagctgacgcccaggagagtgatgagtcaggtccccactgctgagttctggctctcctggccacatcacacaggatgcccctgtctgggactctggggtcccttcattccgcctctcacactgcctctacatttcctacctgtcctcagcacaagtgaggcgaacccccagggttagcatgaaagcctggaacaggagctgaccacggactcccaaaaccattccctgccagagccagggctcccctcacaagaccgaggcagtatggccctgaggctcagccagcaagaaaaacagctctgagacccctcttctgccagccctggcacctgtctgagacctggagacagctcagtccttctagggagcccctgggtttcccaaacacacagcgttctccctccagtgggtttccttcatgcccagacctgctgtgggctcacaacaggacaggaggtccttcaattgtctacttgagtagcaggaggctgccaatattagctaaaaggcagtagggattgtttttctcttcctttcttgccccaattattgttctttatatcactgaactttcctgaagtattccaggtcagagacacactgggtttgtggagaagaccatactgctgaggctgcctgcaaagccccatcttgcctaccaaactgataaccacatgggagcctcctccttctgtgtgtcatgcaagaactcagagcccactcctcactccaggccttgcaactccaaacaccacttcaacctgaaaggccacctctctcccctcttcctgagctgaaacaccccttcctacagggccagcagggcctgctcctccagaaggccttccctgagtgccactgcccacacaagctccaccttctctgggggtccgtagcccacacagcctgctcctttcactttgcccttcagttggatcataccctttgtggccatttggctctttgagtccgtttctttgcccaaacagcacatgagccctatacagagtacaggggagtctccgttcctccagcctgccctcactgccctctgcaggtctgggcagagcagtcgctccatagagatgtttaatttgaggtctggtctgttagggagcccagtgtatatctcagctctgttttcagcatggtctcaacataaccttggagtaatccctgcttttctcccttccagttttaaatccccagcatcacccagcgtaccaccaatctggccccctctgcatcctgccttcttcactgcctctttccttaaggctactacccccatcacagatcatcacaggcaacttggattgttttctattttctcctatgtggaactcctcaggcctggaagacatttaaccatctgttgccatttgctgttctggggcttttcactgggtatgactttggtctaactagacggtgagatctttgcagccttgtcctttcttggctgcttccagagggaggtcagaaagactggatgaatgcaagaatgactgagtggtgatgcttccaagtaaagcagtgcagacccaggatgctgaactgctgcgggtcttctaaattacctgttcaaaagtgtccgcctggggccctgcagctccccttccttagagcccatatgaatatagtgttgacaccactccccaagtcagattagccaccggtatctacaaactatatcttaagcacctactgtgctaccagaaggggttgcagaggaggaggagagaccagattactgggtccttgccctccatgagttcacaattgagggggaaagagaagatttacaggcaggagagccaaagcaggcctgaggttgtgcggccatggccagggctgctagttcagtgggtgtcagagagaagagggtgaccagtgacaagtggctcagctggagggaagctgagcccagtgagggctccctcccctccttgaggaacgagagaagcaaagggaagcgaaggaacaggaggtattggcaaggcctgagtagctagcccacctgaacctaatcccccacaggactttctaacacccccaaagatgaatcagcaacaacatataaacaccaagcccagagagaaaatgagaagcaattgttcccagccccacttccatttgctagccttctccctctctctcagtgggtgaaataattgtggccatgaagtggcacttggagggaaagttaaatctgcttaaatgtcacagtgagtaatactttgcccatctttctctaattacatttctctttgatgatctaaggttaaaaaaaattttaactcaagtcttcctagaatatcaagggtgaggataccaaagagccaacctaatcatgtttcatactattttctcaagggtcctgctcttttattgcattagtctgagacacctgtctgtgttattttatccccaacactctgctatggaggagaggtaggagcctaagagatccagatctgcacctttaagagactgatgcctaaacagaagctgcttctgctgctgtttacactgggtagctcagttagacaggacttagtgtcctggggcaggagctgggagggaggacatttcgccatatatctgtcagaaagatgagaggtaagggttgtgccacctgctaaggtgagataacccaaatccaaaataagccatcatcaggtgggagaagggggagggtggggatctctaaggaaggagcagctctccacagctttgagtccacggatgaagagacaccaggaggggccgtggtgcacagggcaggggagcagtcctggagggaactggcactgcacagaatggaggagtcttcatggcatctgaaatagccagtgccccctttcattaacaagcccactccctggctcactcctgcccaacgattgctattatttatgtattgactattattaataataacatgagtaattaaccccctgtgaataatttacttggacctaggggtgccttgggtggtggcaggaagaggagggtgaacttcagtgactctcccctgagcagttcccttcttttccagctgcccttagctggcccctttccctttccgatgtccgggctttgctttcaggggttgagaggcaaggagagaaaaacagacctcgagcaggaatttactctcctaaactcccctgtgatagcagaaaatacatgccactcagctgtaggatcctgggtgccatgcaccagcaccacaggatgatgttggaagagatatcttggacagagttaatagcctctgctgatgtgtcctaggggaccggaaggaggaggtctcaacctggtatggacacacacatatatgcagtgtggatacacgcagggtccgtgcagagacccacgctgcatccacacaagcaggcacacacggccaaaccacacacacaaactctccaagtgcttagcagggacttgccccccttatcagggcacttcaaaggcacaccaaatacacaaccaccacatggcaaaggctctatatgtgagtttctgttcgagtcatctacttggtcgattcttagaccagcatacaacaccggataacgtaaacccggtaaaccaagtgacgaattaactatacttacacccgattccggcaagcaaaggcaggagaagctaaaatgaaaggatgaagttccacagttctaaaaatcatacttgctctttggtttgggcccgggatcctcagagagaggcgtcctgagcggactcggggcctggggctgcgaacctcgggcctccgggcctcctccggcgctggagagctccgtattgtgcttgtaccaaatggggttggcctgggtttgcaggcagctggggtctcatttctttaattaaaattgcagacatatcctctagtaacgtaatgtaatccgagggcaagaaaagagaaaccctgaaacccgaaagtcgctagccgagggccggcgggggttaggccagccgctcagccccgccgccccagctccccagccccgcagcccgcgggggagcgggcgcgttatttcaatttgccaggcttctgaagcgaagaggctgccctgaaaaagcaaacatgagagaggacggggtgcaggtaaatatcattaacgtgaaaatctgctaccccagccaagttcaccaccagtattcacccctacaggcggggccgctcggaccctgctcccggctccgcgcctgccactccctttcccgcgcagccgagatgccagccccagtgggcctggcggggagtccggcggggtccggaccgggcggctcgacccccggtccccacggcaggaacgactcagcctcgcacctcgggagctgtaggtgccgaaaacgaaacccgcgggggcagcgcacgccgcgcgagtctcggtccggcggcaacccagatagcgattcaggggctttattcttttgatggtgattaaaaaaatatattctatttgaacccgtaaagcagacgagggcaaatcaagccatcccccgcgctggctcaccggccaccgcgcccagcgccttcctccccctccggcgggcgagcgggcaggggcgcccgactcctaccttcctcccgccagccaccggcggaccagccgcgctctccggggcgggggaggccgcccgggacggggacccccaccttccgccttcggaagcgggttggggcgggggtcggaccccgagtctctactccccgtccctctgccccccggcgcggcccgacagctcccagcgccatcctggcaggtggcttgggtggcggtagatgccgggcgggaggaagatgtggggctgctctggcaggttgggggtgcgaggaggaaaaaaaaacagagaaagagacacacagagagacagggagagagcgcgcgcgcgagagctcttgtctatagatttatccacataatatatatttatgtagctttttttctctcgacactgatgaatgcgcgctcggatccccgggcggactccctccaagccggctcgcttttctagtctaaataaataaataaagccagatggaagaaaaaagcgcccattccacctccgccgccgccccgcccgccatccctgcctttgcttcgcccgcctggcgccctaatagagcatagcttggtggataaagcccccctacatacccacacgaaaataaaaatcactatttttaaaatacaaaaagttgcacctgctgctattacaaaaagaacccccaaaaggcaaagagaggaggccggctgcccggctcctcacggacacccgctccccgcggccgccgggcccggaatctcagcgcctcccgaagagccatgcgcctggcgctatttatagccgggggccgtctcggactgtaccatcgccacggcgcggggccgccgactggggaggcgcggtggggnnnnnnnnnnnnnnnnnnnnnnnnnnnnnnnnnnnnnnnnnnnnnnnnnnnnnnnnnnnnnnnnnnnnnnnnnnnnnnnnnnnnnnnnnnnnnnnnnnnnnnnnnnnnnnnnnnnnnnnnnnnnnnnnnnnnnnnnnnnnnnnnnnnnnnnnnnnnnnnnnnnnnnnnnnnnnnnnnnnnnnnnnnnnnnnnnnnnnnnnnnnnnnnnnnnnnnnnnnnnnnnnnnnnnnnnnnnnnnnnnnnnnnnnnnnnnnnnnnnnnnnnnnnnnnnnnnnnnnnnnnnnnnnnnnnnnnnnnnnnnnnnnnnnnnnnnnnnnnnnnnnnnnnnnnnnnnnnnnnnnnnnnnnnnnnnnnnnnnnnnnnnnnagcagagagcgagcggagagcgaggtgtagagaaaccgagggggagagaacccgagtgtgtgtatgcgtgtgcgtgtgtgagcgcgagcgagcgagcgagagagaggagcgagagagtgtgagcgagaaagaataaaaggaaagaagattttctctatgtatataaagatggccacgttagcaaacggacaggctgacaacgcaagcctcagtaccaacgggctcggcagcagcccgggcagtgccgggcacatgaacggattaagccacagcccggggaacccgtcgaccattcccatgaaggaccacgatgccatcaagctgttcattgggcagatcccccgcaacctggatgagaaggacctcaagcccctcttcgaggagtttggcaaaatctacgagcttacggttctgaaggacaggttcacaggcatgcacaaaggtgagtacacctttccctcccaactttgccggggagcaggagcgggctggcgggccgaccggccggccggcgactgacgagcggcggactaagcgagaggaagcctcgggcgggcgcggtggagggaggcgctcgggcagcggagaccagagctggggtgcgtggggagctgttcgctggggcaagactgggttttaggcgaggtgctgataggaacgatgccatggagagagcagcgggcgccgatgaagagaaagagagaggggatcgaggagacggggcttggatttttgggtacagcgacctgaaagatggggatggggaaggctgcaccggtcgagcccaggacgctgagcggacggactcgcgggctcctggccggccgaggaccgagggtgctgtccatcgccgtggtgctgaaaatactaaaggaggtggtctcctcatcctttgctccgggctagagtagcaggagcgcagccgtctaaaagggagagaggtgacaaattcaaagagaaatttttatttaaatgtaacagtaaactctccctgtcgagctgtgtgcctcaataatctgattgtggtgtgaatggtggtgtgtgttgggggtgggggggttggatgtttgaaggaaccagtgataaaacctaaggcaagaattagcaaggaaccagccatcccctgggtggagtggggggtctggcaagcctggatagtccccttcccaggaaagcggggctttgggaaaaaaatatgtgtgtgcgagatttgcattttgaaaggtgtaccctaatttatcccaaactcaccatgcagagagctttatagtacattatttctcccttgaagcgatcattgccagtgagtgcttgggggagggggagacagaataatcaaagaattaaaacacagcaactttttaggaaagtggtcatgggaattgtccgcagcctgcctgttttctccttgttttattatctttaaagcagagccccaaacgtgttcagttgtagaatgtgtgtgggtggctggtgggtgacgaaattagcccagtgctccgcttcctaacagtaatatataggatgtgcagcgggaatgaatcggtgctggatctatgtgggcaagttaaatgctttctgagagagattgatcgccaggcagggaaggagcacggggctaaggaagttgtaggggatgtgtatggatgttccgtttttaataaacagtagtgtggagagccgccgaagatgctgttacagctggtggttttaaagatgaaaacacacgcacacccacccccacatagagagcagcctcatccttggccacaaatgggctatggacacagctgatcctccagcacattaggtgcagagcgcagagctgtctggctctctaagcagcagcgattttcactatcacaaccaccctctttctccagccctcccttcgttcgaatactaaacagagctccaaactcttcatagttggagtcccagagagcagtttttattggctttagtatcttccagcttgcctgctgaggagtaaatcttaaagttaatggcatgttgagtaacacaaaaacacagcagaatggaaatatactgggtttgttggggtggggtgagggtgggggctgtaatggagagagaaggcaacctttatccaatatggagaaaatgtctgtctgttcaaaagagagattggaaaggtggaacggggaggcagccttcaaaataatattcgaagaaaaaaagaaaacactttctttttccccccctccctctcaagtcaaccatatctttgtagtttttccccttccaatcaagcttcctagaagctaatcaaggtttgtatcaaacctttgttattctgaatgtcctcattgtaaaaaatagtaataataaaaattttgaaagcataggtagggaagtcttctgctcatcttaatgatcagtttttgtggtgatttaagattttaaagttaaaaaaatcagaactcactagaggcaaaagacagttatgaggagctgggcttcatatggcatctggattaaagcactttatttgcttcttcatttcaaatgaagataaactttaacaatattccttggtttcttttctacaatccctgatatcatcactttgttgctgatgtaatttggactctctcatataatagcaaagaagtagaattttcatcatttgcattagggaggtagagaaggttatgattatatatataatatatacgtaatacatatattacatatattttatatatagatatagatatcgatatataaaatctggccagaattcctaggacaaacaaaacttcattttctaaataatttctcccctaaactgtctcagtcagtggcaagcaggcccactagctccggcatactgggttcctcgttgtcgcagctcacccttcagagcctgagcatatatttttcccagtgaaacttcctacctctccatccttctgatttttataatcgaggttggaccacaatgtccctaacagtgcttgcaagctctcagagagctgaataaatgagaccgtttccgaggtctggtttattcagtcctagaagagtttaaactccttcttcggtgatggagcctgatttattagctaatcctgataaaataagcctccggccaccttaaaaaattactcgcttgccattggtgattaattactgttaagtcagaaagcatgatgaggcttgaggaatgagtgttgcatttggtttctagatttccccatctctaaattgacaacataaggttagggatagaatcatgcctttgttaagcctggtttcagggcatatttgtgcctcttgctctccccttccttaatttctaacttctaatgaatcatacaggatcaaattgagagacacaggacactggcctccagtttggatgtcatgtttatgttagtggcaaaaaaaaaaaaaaggaaaaggaaaagaagtaaaaactaaattaaacacaggaggtttcaggtgggtctccatttgttggccacctgccatttcagatatctaaagaaggaaggagttctaagggttaatggaatacctgccatgcgtagagtgcaccttaaaaggcaattactccagtcaaattgggagtctgtggaggagggagtgggtgggtgttgtggagcaaacccagccatatcagagaaaggctgttgggctggggaggcagcaaagagcagttgtggactggggtgattaccgtaaaggtaaatttaccccctggaggccagaaagcaattggggagaggggtatctgggtgctaggcagagagagaaaggaagaaaaaagcccagaattaaaattcaaagaaacaacacccaaggaagaaaaccgagtttagtgcaaactctcctgaccaactcagagtcttcttttctcccctattagagcactttgggaaagattgtttttccaggctccaaagagaaagacattgtactattgattaaagagaaaagagatgaattcctcgggtagcagcagaaatgagctgagggccaattttacccctttttgtagaatttttctaccctggagaagggaacaggtcacccagtagtccaattcttcctttctctcatttttaatttgtttctcttttcttcttttcatttcctgtagaacaaaaagaggcagtgtctgaagacacatatatgtacacatacccatgcttgttaacactcacatacacagtggatcacacatgaagaaatcagcaatccattcataactttggtcctgtctagctggatgggaggcagcaaagactgagttactgggagatataaagactagtgctctctggatagccatattataatgcattatctttgaagtcatttaagtccaatttaagtggtatttagtataatatttatgaattaacgtaatctaaacataaggctgtccccaaaggtttaaacagcctttactactgatgtgtgcttgttcccagagcctacgatgcattttaatctaaacggccaagtccacatcatagtccctcttgttatccagtcagaacagatctgtgcctgggtaaccactctgctttgagattttctcagctacatggaggaaaatctactttaccggcagcctgggggactctcagcccaggagccacagctgcagggatttcagcccctcatacttccacactacatccagaagtgtggggacagagcaatagaatcttctgtggatttagctccagagagtgtatcattttaaaatatactcaccaccacatgcacaatcttctatttcaactatacctgaataggaaatgcctaaagccccttgatttggggtttagctgtgtgaaagaggaaggacggggatatgaatatgttttggtgatttgtgaccatcttcataaaattatgtcttgtatttgtgtttaagatataataattctcagaacactgaatttccaccgcttgactttacccaagatggttcgttgttttgtggggttttgggtgtttttttcctgctgtagacaggtgatttaaactgtgaggctctatgtgatttccattttcaaatgagtctaagagacagtgcagctgaagtattagcatgggcatgagctcaattaagatgaacttttttttaattactttgaaaaataaaaattcagttctgtccagggggaaagactggcagaatggctaggtacacacctatagcttttaaaagaaagatttgccttgtcagagacagggaagactgaatagccataatcagaaaacaagaaaagcattttttaaaaaaacaggtttcaccaaagaaaatgatcaatagcaatcattacaaacctaaagcatatcaaagcaacaatcaccattaaaacaaactccaaattccagatgttgataagtgtcctacttaagagcaaagaaaaaatattgggaaatgatttgcttatttaagagactgatggttatttgctgcttatgcataatttcatttgtcttttaaacagactttcttggaatcaacaaacacagagataaattaacatgcacatatgcacgtatatgttttcatgtgcaagcatgactaagcacatcccacacatatggaaaccagggctggcctagatttcagtgcaattcaacagggagatgttaacaacgtccctcccatccccaagcacacacagttttaatgggaattctagattgggttgaaataacccccttggtatactttcactcccttcatcacctgctccaattggctggatgtttgtggcctctcaaacacaacaaaatgaaatcttttcttgaatgaaatcatagccataaaacaacgcaaaggaaaaaaatgacaaaactgcctgccatcactatgccccctacacactcatgtagtaaagttctgagttctatcagggagctcgtgtcccagggcattcccactgcccagtgatcttgccacactccagcaacttgatcatggccattatcatcactaatagtagcatcttcctcctcattattacagcatctatatcaggagggaagaggggcttctgagtgaggccttggaatatatccaagacaccacctttttgcttgagaaaagagcttgtctcaactttgcctctgtccagggctcacaccttccatgtcatcaggagagagtcagtttccaaattgacccagaagggatctcacctaaagagaatctggaataagtaggctctagagggcagaaatgtaacagagaataaggctcaaggtggcaggtagagaaaaaaaaaagtgaaagttgtagggtcaaaatgccagctagaagctgggagtgcccgtttacagtggctgaaaccacagcagttcttgaacttggaagggaaatcccatgtgacatgcagagagaagagctaaagggtgtgaaaacctatgtgtctgtgggtaggaggagggaagatgctgcagcctgtgtgggtgttggagtgagcatgtgtgtgtgcatacacacacacagggaagagatgacagatgcaagtggcatggagatgatgttagggacagtttaatcttgcaaggctatatgcaggatcagggagaagggtgaaggagaaaaggagaaaatctggaaagaatgatgctgtcctcatcattacatacatgatccacctcagaactcctggcttggatttgtcagtgatccaagtcctggtgtgaaggtgtgctttttgttttatctgcctgatatccccatccagaagtcctggtttggaggagggttccatcctcattccccacccatcacccttttaaggctggcctgcttctgctcacccactgactcattttagcaatgaccttccatctggaatctgagtggccgagtggccagccgcagctaattcccttcacccactgcatttcccaccttactcactgcctcttggtattccaggcgactttccttttatagtgtacacacacacacacacacacacacacacgacctgacagctcagtcaagtcaggccctccaagcagaatactgcattttacctaaatccaagcagggcgtggcagggagccggttgccctccttttgggctctctataacaagagcagaaaatccactcctttcacctcttcttttcctgcaggcctttagatacgcagcctctccaagaattgcagaaagcatccagtcctacccaaacagcctaggggagtagaacagagcccccccccacccgccccccacaatttcactgaagccctttcatcatccttcctctccttttctgtcttctctgacatttaagatatccacctaaaccccaaagtggggcctgaagaaggagataagtgttccattcggcaacataagagaagttaaaggtaccaggacagggaaaaaaaaaaaaaaactgttacaggggtagtaaaagctgcagaggaatttccagtgttgatgtatttgccctaagagcttcctccatctccacccatcaagttccgcatagccctaggtgggtataaagcccaagccacagccctacccacaggaaccaagaaggaagccaggtgggaagcccaaggtgattgccttgatttttgagtcctcaaaagtagaaggggaattagtggggcatggtggtgcaagcctgtagtcccagctactcaggaggctgaggcaggagtatcgcttgagcctgggtggtggaggttgcaatgagtggagattgcaccactgcactccagcctgagcaacagagtgagacccagtctcaaaaaaaaaaaaaaaaaaaaaaaagtaaaagggatgttttcaggaccatccatttacagggtttctccccttctacttgttccacatttggtttctcttatccttccttgtatctcttctctagcatgagctgatcgaggatttcaaacagggtgattccccgcagctcagctcaggaacaaatcctatgtggccttctgcaagatggaaataaatgggtgccctcatggagagagacatagtcctgcttctgtggggacagaacagccaaaaatattgatcaaactcaggaaaaaaattgataatgaactggcttcctacaagagcttaattgacagagacttccgaaggccggctctggacaacgcataaactgaccgcgatgttactttattgcaatgcactctgctttaattaattatcacctttgttaagagtggctacagatcaaaggtttctagatacttaacacatcttttgaacaaagccccgatgtattaggctattccacagctggccagcaaggcaagctagcttcccattttcttccctcttagctgttggcttcctcctctttgttaaagacaaaaaatcctttctgcacagccactgtgttcaaggaccgggattgtgagaactgttgtgcaccgagggcagggtgctgcagttcagcagctgttcctaaaattacacaacttggttcacccttgaatcaatctgactgaaatagggagtatcagcagaagaaaaaggagtttatagaaacacaaaaggggggtgtgtgtgcatgcacatatgcacgtgcacaagcgactatgtgcacatccacataaatattgtgggatcaatacatttcacatccgctgcccacacctcttaacttctccctcccatctcttgagcacctgtgctactgtcgtatttcacactgagaaatgctcgcagctgaagcatgcatagatgatgctgtattgaaccaagtcattgtttggattcagttgtggagtcttggtgcccactgaaggatggtcctcacctggggtatgtagtacctaaagaagccacttcttaagatgtgacaggagcctcactctctagagtccccaaaacctacaaactgacaggtgacttacttgaaagcaacccttggagtcattctaggcagatttgaatgccatacgtggctgtttgttcattattctaatttaatgatgcagtcacacctaattaatccatgtctggtttattcatacactatgtctgaggatccaaaagatctctccagctagccagtttccctttacagggacaagcaagggggcatccatgacaagtgaggctgtctgagttcaaacaggatgggatcactcactgtagaccaagctgatagaggctactgaccctgacaccaccttccatgcaggtaggcacaacagcagccacagagatgcacagcaatgaggtctgtgtgaccatgcacaaacacacacaagcacaaaaagcatgccttctactacaaacctacacaaacccattccctctaaaagttaaagggccacatctcaccatgtaataaatcaggcctgctggcatgccaggctttcatatgattggaagttttggtgcagaaggttgagagcctgagctcagtaaacttcccctctctggtctttagaaagtagagctgaattaactgttgccactgcatagataaagagactgaggctcagagtagcgtatgcccaaagtcaagcctgcagcatggtcttcagtgcacctcccagtggctagttctggccagactgctcccagtgagtgctgtctcttgcctggcaggtaaattgagagaatgaggcatcaacctaataatatccttataaagccaagcctccttgcgcaagtcctcggagacaagaggcatctaaagatcaaacgctacatcacagtgtatttgtaggaactctgtgattctgctacctccctataatgctgtaattgactatttgatcagctctaaaaggaacagtgttcaaaacagactcacacacacacactcatacacacagtcacacgcacacttacatacacgtgaacacgctcgcatacatacacacacatacattcaccacacaagcatatgcgcacacattcttttgcataccacatgccatggtacccacaccagttcatgcaacaaaggtcaattttcacaggagatgcttgaaggtgagtgaaaagcatatacctaagattgtatgtgcccttccagtaatgggcttatcaatacctcttaaagcaatgtgacagccagcccagagtgattcagttgtgtggacaaaggtcagcgtatagatatccattattaataatatcaatatcttggttgaccaatataaccagaaactgtatcatgtcgctgttgatgggtgaggctgggaggactccacagcaatagccggaaattatgcccatgtaaaattaatcatattgactggttctaagaatatacagctaggcgaagatcttgggagagcttttcatggtgggagagggggtccttgttcccagaggctttatggttttgaactcctgcaaggagaccggggaaacagaggcgtccctgagtgaccggtgagaacactctccctcatccggcctttgcttttcaacagggtggggtggaggagaggtgtactctgaacaggaaaagaaggaaataggatcccctaaccattatgcatccagtatatccatatctttctgtcaaatcaatacttggcttggcttggtctcaccggatgaggcacggaaagcatgcttgcccccgctgtgtgaagaggtctctctccaaaggggtggcatgagcctgaagccacatcccattcctggggtgggatatactggctccaggagatgccagtgtgcactctgcagcctgggtatcccaggaggaaaggaaaggcccccaatcatatcaatcactgtgattaaattcttgggatcagcagagccagggactcagggtgctgccctgtcagcattgctggtagggtgggaatatcttggacttcagaaagccatttctcactgaggcttactttcagccccagtgactgagaaggaaagcctttgcatccttccaagggaaggcttggaattctcttggggcagtcctggacccctcactctctttcttataagaaccctgtctcaggacgtccctggcccttcttggcagccatagataacacctggaaggatgtcctggggaagaagtgaaaaggagagaacccccgtgtctgggcgctcctcagaatggaaagagggcagtcaggaagtgtctctggtgacagccaaaggcccaactggctttttgatcattctctgtttccagagtcgtcaaggcaactgaaagggagcctgccttagagtccaggccccatgctgggcatgatgatgaataagaaaggggctgctaagatgaggggcgggtgatgcctttgattgtaaaggagggcaagtaaatgggacctgtcgctggaatgggagatggggctgcttgaggtagagtgctccccttctcataagaaacagctcaggccccagttgaccagccacatcctaccttcctttgatttgctctcccactcacccagggtcatcaagaggcaagaaggtccgctggcctctgcacagtcagggtcccacccaggtgctcacatccaacctgcgggacaaagagccctgcgggtcactgccgttccctccccagtgcacacaacccagccttccttgcagagccccagcccccgaggctgccccagacagttcccaggcccccggactggctcccatccctgcccaggctgggcacagcctcagagggtatatggggagtgtgggttctggcaccagcattcagtcatccgcccaaagtgccctctcccctcctcagccacaaggcctggctctaggtagctctagggagaacagcagagagcccagaagctagaccacttctttacacctttttcatacctggggaggaagcccctaaattgcgtgtgaggggagggttcctctttcctccagctgtcgcctgccctctgacggtgagacgaagaacttcttacacacacactgcgggccccagtctgaagtgcccagctcctgcagcagcccaggccctgcctcaccccaggagctccaactcaaacctctcccgcaccctaccccttaccctggccagtgttggctgctccttctgcacagcagctccctgcgcgggtgggggactctccacgtcatttccctcacttgacaagccgggcctgagcctgggacaccagcaaaacagggaccgcaaagccagagaggaggatcagaaaacccaaaaagtattgtcatttctgtatccatgtgagttttgtttcatttcaaaaattaataattacagtctacgatttagtgtgatttttattcttaattccatatgttggggacttgttagcaaagcaccagaatcttttgcatacttagggcctgacatgggtccaactccaaactgctgtgtcccggaacttctgcaaaggaatctccaaatgcccccacaagacgcacacacgtggcacactcatatgctacgtgtgatgaaatggatgggcctgggtggagaacccacagattagtgatcaattggtacactcaccaccccggtccagctgaggccccggtagagcaacttaagcccagtttatcatcagagtgacaaagacacagagtatgactggcttattttcaggctcattttcttatccaatttaaaaaaaaaaatctttttattgaaaaacaggaccttcatctgtactgtcatcttgactatttcaataagcaaatgattacatttattttagagtaaattctgttgccattctgttgggcaagtttggaaatctggaatgaggaacaaacggcgaagcctgggacccggcagctgagttgggtccccagggaaaagagaggaacagcaagttaaagggtgatgtctcagtgcgagaaaagcacgttgttgagctgtggtgaatgactactgggcagaccacgtcacaacagcagctcaggccttagagcaagagatcacactcctgaagggctgaccagccacacaccagctgcagaggacatgcttcctccaggagaccccagctgagatacgtgggaagccaggcaggaagggccaaacatgcaggctgaaccatccagctggagccagcagaaagccaggctcctgtaccctttgtgttcaagttcaagacccccatctgccccttatgccatcaccagggctttggtttatttctcccttagtttctcaagtttctcagcaaaacattaacttggaatgttctgaccttgtcttggctgagccagtgattaagagggctagtctgcagcagaggccacacagccaggaggagagcatccctgcagaccagccaaggctggaggaggagcctgctggggcgggagttggggagtcactgaaccaactgccgttgacttctgggatgccaccacccctctcgacactcaccctcatcacgcagaggcaggtttctgcagagcagggagtgggtaggaaattataggctgtggcgggacataccatggccccctgcaggaaagccccagggtctgacaggggagacataggcctccctcatggaggtgcagattcatgtccaattcaggtgccctgagtgtcaggctctgttccgacaaggtgggggacccgctttcactgccacaagataacttgagatgtgatagaagacagcaaccccacaaacataaaactgtcccgtgtaaatacgctgttgaggggggatgtgggaacccccgaaagataagtagtcaggtaggggcactggctctaagccagattcccacatagagaaagacggcataagcccagcctggcagatgggaacgggacagagcaggaaggctggagagctgacaagtcggggagttgtgttttgtttctttccattgtgttttgtttttgtccctctgcaatgaagtctcattcttagaatggtggacaaaggaatttctcattttgaataaatttggacctgccgccagcctggctgagggagaatcagtcatgggtgggtgggtgtgttgctgttactccgaagaagtcagtgatacacactgaaactgccagggctatcctcacctgctttgggtctgcagtgtccttcagctgtcccaattgcagcccacttgggctgagaaattactcatggaatatttaaacccgtggccatgtttgctgtcaccaaggcaggcattcagattgtccccacagactcactcagctgaacatcccgagcaatacactataggattccaggggctggaatcttcctgcaccctcacccttactctgctcctgcccccagcacaggagtggctggatggcagccaggccatggggatgaagctgaggacagtttcctggggtgacactggccttgcagctggaaaaatattgccaggtcccaggaagaactgcccccattgtcaacagcacacctgggcaacgtcctgagcagacattttttactgcaggagagcagtggaatgggcgtacttctcccatctctggaagagaaactcagcccaggggggcagtcatggctgaggtggcctttggggctggctctttaggggagggagattcccctcttatggaccttccacagaccacaatcctggcatcctcctgaccccagggatttctcaggggagaacagaactgggctcagtcatagagctggagtgactgaaaaactcagttccctgcagggatatggacgtcactagtgttggtcttccagtaccctccgagttcccagtcatccagcctctacactccccaccccaagtcccaaaccccaacccccaggccaccaaaccaggactgagggctctcaagcaacggtacccaaccaaaagtgacctccttttcctatcatttcaatgccttgccccttgttggtctgacaaatcaaactgggccgatgtgtccctggtggctaatggacattaatgtgttaccatctctgttgccacgtgccttttaacagggaccttttagagcccagtccttaacccaaagaaacgtctctaatcggggggaattttctggcacaggccaggccagagggagccagcgtgaggcagggacacctctgtctactgggaggcagcagaggtctgcccggcctccagctctgttgcccaggcagaactccacctcccctgctgcagcagagagggacccaggcagccagcggacgggctgatctctttgctgggctcccagtggggcctgcggatcacagaggctgccatgccaaaggtttaatcaaatattaaacatggtccgtaaacttaaaccaacgtcatatctggaacaccacgtccctccttaagagcaccaactctgggaaagtttcagcttagcttggtctgggtacagggcaggggcttcttggttcatgctcccttgggggcaggaaaaaggagaggcaggcagagaccacagcatgggtgggatgtgtggctttcctcctccattctattattcatttcccctgatttttatctaatctctccctgattgtcctgatgaaacttaatagacaaagtgaatttttattacatcatcaatataatctccagctaatcagcagacacaggggccactgcaagccctatagctcctcatctggcttcataaatagtaggaacaatcactgccaagcccaactcttccagctcctcctgagaggcccctttccctgctgagccccctccccagacctattcttggggtttctttcttcccacggatccccgccccccccacccattggaccacattgccagttgatggagatatcttccccattagtatttttagttttcttcctcccagcttcagctgttaaaatcacaaatctggggcttgtgtttcgaatgccaaaatagcctaatgtcgactgattttgattctacttttctctgagctggggatatgatatgtcataagatattatataattgtatggatcacaggacatactatcaaccacattatataccagattaagtgataggttatactgcatatatataacctatatataaaagtgttttggtcatttaaagttgaaccatgcatcttgtgcactgtatcatagaagttaaattatgtattttatttatattatagcatgccttctatttatatagcattttaatctgtaaaatactttcttatatagtacctctttttatccctattgcaaccaggtacagttgatacctttttcataaagaaaaatgaaaaagggatcatgaaggaaaattacaacctagtcaaatcctgccaggatacggcagaatggcttggctcaggatgtgtgccagcaaggcagggaaggggtcaccagtgaatcagggatcaggggcaaaggtgtacctgctgaccaggcaggcagattcgtaaggcctggcctgcggggcagcccctggccaaagggcaacctttcgttcaaggagtaggagtttttttccctgtctcaaacctgcccaaagttaaatgtacaagtgagtgcaccccttccaagccctcttgctatgagactagtcccatacagtaacaggaggctgccttctcctctgttctccagggtcctggtcatactgctctaggatggtttggatttcagaaaaatagcaaatgctacttacagtcaaatcctttaaataaagtgagtgatgaggctaataaatctggctttgggcacccacaacagcgtagactgtttgggataagggtagtctgcttcctgctgataatcaggaccagctctgggagcgactggccccgcttcaccagtcacccctctgattcctgaggggagggctgtttccacgcatctgttcggtggacggtccgcatgtgactggggctcatgcacaggcccctccagcttggccctgatcattcaggggtggcctggatgttgcagggctcctgggggtgggcagtgtttcgtgccttggacactgcctgctgcagaggtagctggcacgccaaggatgtactccacgtaggagccacatgcctgggtccttgccccatgctggctctggctcccgcacggaccagtgtcctcacctccttgctcagagcctgggccttctgctctcacatcactgcagcaacacctgctcaacccattgcttagggtcattgtgaggatcatatgagaagggaaaacacggtgcaaaagttaaaatgtccagggtcactgtcatgcattaagggccagcacccctatcagcacccctatcagctctgagggtccggctcactatcggaaacagcacataaggggcggcacaaaggcctgaggatgggtaggaagggatattggcaatgcacctactacgtgacagtgacacacacacagcctctcacttgttttatctcattacatcctcgtgacaaagcttcgatagagatgtcactgtgcccctttgaatgccaaagaaatggaaactcggagagcagtaactcgactgaggttagatacacccagattggtcatatgctcaagccggccacgcttccttgactgcatgctccctttatggaagtaaataaaaagatcatctcttacatctccctcattttgcagatgggaaaactgaagccctgggacattactggctaatgttttcttaaattatcacacactgtcttgtatggaggatctgaaaaaacacacacacacacacagagatgtgtacacatttatggaaacaaagagataactcacacagacacaccctcatacagatacgcacatacatagagattcaaaaatcagtacacacagacacccataggaacacactcagaaataggcattcatatagatactcatatatgcaagcacacacacacactcaaaaatgcagacacattcacaaacacattcatagacacacacatatagaaacattctggcacccataaagaagtgcacatagagatacacacacggacccagatacataccctcacacagacacacatactcacataccactccttaaagacaaagcttaattaaccacaaggccagagacacaatttatccacctaactttttagcaagaagaagtaaaagcagctggtttggagagagagatgacaggggcccagcttggaagggagacgggaacacaggggccccataaagtctgtggccaaatcctcattagaagtcagcaaataaacagaaggcatttgctgagagcactccccctgcaatctcccttctgcgtcaacccacagaatcttggccaaatttctgttcgtctaaccaagactaaaggcaggacctggagaaattttgggcaggccttccaagagccacccagccccaggcactggctatagacagctctcaggtaggtaaggggaggcctgtgagcagaagaggcagcctccagggggtggcaactgggaaggaaggagaggagcagggtaggtctacagctgcagcctctcctggtgaccagcattcaggctacctctggctgtggctgagtgagaaagaaggtttttgtacacccagccctcagccgtccacccaaggctgctccagcctgggggggctcctgttggctcatgggaacacatttggaagagaagatggccctgctcagctgtattaagagaatacacacacacacacacacacacacacacacaccacacacacacacacatacactaagcaaagggttaattgttgtaaggagttcgccagggaacaggaaacctatggttttcttttctttaaaataaaatcctgaggatccaggaatgacttctctgtttcctccatctgctggataagctgaccatttggaagttgagtctgtcccgggatgatggggcagccttctttcgcagtactgacttgagctacatgtgctggacaggagagatgaggggttgtcactggaggtactgcatgtgttgccctgtcctgcgtagacaaactgtgccagctggctgcaaggggtgaggcttggtggacacctctggggactatggcacagagcaggctgtggtgtgtctgctagaggtgtgccatgtagattcatgttgtagacatgggttttatatttacactgcatcctgtggttctgctggagcatgcacgtgtgtgttggtgctgtgtgggtcagtgtgtgtcatgtgtgggagagctgtgttttctacgctgttctggaaagagaggggaggatgcccagagggctgtcttcattcctcccaggctgcaaagctcccttatcctgggacttgctatctggcagagcccgaccctttccctcccagctcagggtccagaggtatctcacaccaggaccacgtctgtccacagcctgaatgaagtgctctgagtctgaccaggattctggaattggtagccttttactctgcagctgcagtgagaactgtgtgtgtgtgtgtgtgcgcatacatgtgcgtgggtgcaagtatgtagtgagcgtgtgtgcacctgcccacacaccacttccaagtgagtacactccaatcccggcctgtgagacctgggcgaggagatgaggagatgtgcggacgtgtatgctcatacatgctgagtgtatgcaagtgtgtgtgggctgcgacgggctcgggtgggccaatttttagtgacagattgtgtgtacgtctatgactacagtttctaccaagtgcatgtaaaaaacagaagagatgagtccaactccctgggtgggcacgcctgcagttctctgcaaatgtgtgtgagcgtgggtgtctttttgaggggcctctggccagttgtaggggaggagtgtgggaaaagtatgtggggagaaagggctccacacacgtgtggttgtgggcaacctagttgggtgggacgctaagtcagacagtgtcctccagagacctcgccactttcttggatgcatggctgggccatctgtggcatcttctcacattctgcccacagattccctgggagaccggaagaagagggggtcagctccccagaaggtagccctgaggtctcttcttggagacagccacaagtgcagggccgtgtgtgtgtgtgtgtgtgtgtgtatgcccacacacacgcatatgagagtgagagagagagacggggcagccacaggaaaagagaggcccctgccccactgcctccatccaggcttgagcagatggtgctcagactcgaccagcgaggccagaggcagcacttggaagcaacgtgtcctgaggaaagggccagagtggggcccagggagatgctgtctggctaaatgcatctctgctctcctgggcctgtccttctgtccagaaacaccgatctcctgagcctagcccatgtgtccagctacagatgtttttattctctttgcctcatctctgggccccctggaggctgaattcagctacttggggtgcaggcacaaaagccaggccatccccaagcctggccccagcccacctctggctccagcgtgagtcattttgctactaggcagcaggaggaaggccagtcctacctgcccaggagtcctgggatctcaggcacagatctggtggttacccattcgctcatctggaggccccaccactcttgcccctgaggacactacccgctcctcacacccaggctgtgtgctttgcccaatgcatctgcagcaagctgctgttgggcactggtgcccttattatgcccggtcttcctgcagctgaggccagaccctgacccttcccagcctctcccagaacacatgtatcagaatctcctgggattctggtgggaaacgaagctcctgacctcaaccccacacttttgaattccctgaggatgaggcaaaggaatctgcaagttggaaagcagctttaggggtctccatgcatgtcacgttgcctgtccctggagccccaggatcagctccctgtccaagttgtcaacaatgctgcggcttcctcaggcctcaaccagacaccctcctgagtatcccctaactttctgtggcttgcctcatggcccctggggctcagctttcttcctcgggggaatgacagcctacatttttggaaccatctgcttatgccataaaaccgattccttaggctgttgttataactgtcataacagacatgtcttccccacttgcaggaagtggatcccaatctcacactcttaaattctcatcctcacgtagctacacatgcacagatacacttacacacatacatacgtacaagcacacacacgtacccacatacaggccagccaactcctctggtgacatattacgtgcaagttctttgttttcaatggtgaagctattctgtgcccagctgtgaagtcattcccctgctcagcacctcacacagcttcccagcccctcccagagtccattcagtggggagtggaggctttgaaagcagcacaagggccatgcaatgcatagcactgaggtccagccccgcagctccgctgacaagctgtgtgagttggacaaatccctttacctactggtcggcctcaatctccctgtctagcaaacgggaatttacaccctgcctagatgagctgcttgtgaacgtggaacgcagtgatttcggtggagcatctgacagagcctgaaacatagtgagcctgagataattgtagctgttgaacaaatgaaaaaaaaaaaaaaaggaagtaaaagagttcacaacctaggacatccctggccttgccgcccttgcccttacctcagccctcccttcctgggaggtaagttgcatctctgcacctctgctcaggctattcccccacctggggtaccctcttcactcctgcttcccccaagccaaggcctgcttctctggacagaccgcaccgagcctcctccaggaagcctctaactgctgcagccccatcagtctctcagagtcccccaagcttcagcctccctggagcttcagcctccctgcccagcggcacagaccacgtagcggcctctctcattcatctagagggaatggaggggccatcaattggtccccagaaaagaccagttgttttttcaatactaagtgtattgtaaatattttcattgccaatagtatttgtcacagaaaaaataaacaagatgacaatgtagcaagaagaggacacccatattcccactccccagagataatgactgtgaaggttttggtcattgtgcttaggtccggctgctggttccagccaggtgcctcatgcaacctaggctgcgttcttgctcacccacactgtgcccagtgctgggctgcacatcatgtgaggagcaggaggcagagccacagcccctgcccaggaggctcacacactcatggggaggtaacacacaaaaaaagccatgcccaagcaaaagtaaattcagcccctgccacccaccaccaacaacctgacttgagaggccctgtgtccctcacctgcttggggagatggccgggaagatgcccagcttgggggaggtaggtcagggtacggcctgggtttggaggagggaggaagcctttcattctagtccaggaactcctttgagtaagtcactgggcacctgtggagctccatttcttcctctcgggatgggaatgaaatgggtcacctcgaagaacgcttcctgtttcacagcctctaaccctatgatgtaaagttcatgctggatttagagttcagattccagggtggtgcaacccttggggagctcttggaggctggggatgggaaggcatgggaagatttgaggggttgctcagagaccacagtcagaggtgctgagtccatgcagagattgaagagttaaaatggaggtgggtgtgatggggagtcctcatcagtattgggctctaaccaagttcaagggaggcaggagtgatgtcgtagaaagagcactggatctagagcccagagacttgggttttcatgtctgagagccaggcaatggtcaggggcaaggcatttcattcctggagcttggagcgtctcctaacctgtaagtcaagaataacaacactggcttcatgagttattatggcaattaagtgagaaaatgtagaaacatctagaatagtctcatataatgataataatcataatcataataataagagaggaattgttaacatgtatttatcatttaccgtatccccagcatgatgccaagtgctctaatgtgctatctcatttaatgttcccagttttcctaggagaacatttcaatttctgttttacagacaaagaaacagaggcacagagtttaactgccctaacttcccagggcacggagcaagtaagtggcacagccaagatgcccagccatgctcccatgagtcgtacgcttggggaagagcgcctgtgcctattgtggttaagtacccacatccagggagtagaggtcttcatgactgggcttcagccttcctaagtgtagatgccaccatggaagatcagagcagccagctcgtgaagttcagtgggtgcacagcgagcactcaataacgagtgtttatttattgcttctgtttacagctctattcccaaagtgaattgtttgtttaagtaaggagcatttacctttattacagtcattggtaaataaaattatatttgcatttccacaaatatgtatgagtttaattagtcttgcaattcgtacacaagagccagtccaggaaacacatttatgagctcccacttctaccctaggcagaaggccttctcccacaaacaccatcaggattgaataattcactcattcacaaacagttactgatcacccactctgtgccactgctggagtcacaacgatgaccatggcacagaaacctctggatctcctggagctcacattttcatgaggaagtcagatgatacattaaaaattaaaattaaaaacctgatcataagtgttgtgctgagaattaaaacatatggaagaggcatgactggggccgctgtatacgtgtcagtggggagggctcctctgaggaactgacagtgaagccaagatccaaacaacaagcagacatggcgggagaaagcacttccagcagagagaacagcaggtgcaaaggcccggaggcaggaatgggctttgtgtgttcaagagacaggaggaagagcagtgtgacaggcgtgtcctggggtaatggggagaattaggtgggaggggctggtgggggcaggttgtatcaggcctggcaggggtgtctgaattgttttctaaggttagcaagaagtgttggaagagccatgttccgatgtatgtttcacagagatctttcggctgctgtgtggagccagctgctataggagagcagacacggaggggggcagccagaggagcaatggtggggcatggattaagaagggcagtgaaggtgcgagaaacagacggggtcaggatgtgtttgggagataggggtcccaggacttgttggtggattgggtgtgatgtggggagaaagagaggcgcccaggacgaatagaggcactcagtgctgagtggggccgtttactgggaaggaacatgttttagggatggatgatcaaaattctgatttggccttgctgagagcgggaggcctgttagatgtccaaggagaggcattaggaaggcaggtggaatatgatcctggagctcagagtggtgatctgggctggaggtataaatttgagaggcatcaatatgtcatggtatttaaagtcatttataatagaacaaattaaacaagacttcctagatgtgattattgttcctcctcagtgtggactgagcatcaattaggtcacagactgtgtgatgcacactatgaggtcatgcatgcgtgaagcctagaacagaggatgctgggagtcctccttccccatgcccccactccacctccaggcaggtgctcacccacactgacactgccagccctcactttgtcattaatgaatgagataaaggaaactgttcctcctgcctcaaattgtcctgcaccatctcacagaacttagcccagctctgtccctcccatgctcccacctaaatccctcatgctgtagcttcattccctccagcccttgccagggccactgctgctgccctttcttggagcatctttcccaggatgccaaggttgcattccacgcagcagggagagcgggaactgctgtccaggggtgagtcagccagattcacagtggtgatgtaggtcgcagagctccctcctccctgccccactgctgcgtctggagccttcccacccagcttgccccacgatctgtgtccttgtggcccacatatcccgacccagccacccccaccagcctgaccgtgctggctcgtttctctgaacccctagaagggaagagctccttgggaacttctctttggccccccagagccatgaccaaatgcctgaggcagaccgctggcccgttttccctgttttaaagtaaaaaaacaataaaagcaacacacaaagagagacgctgctgttttacttacaaatgagagatgtaatcattcacccaggtacctgggaggctctgggctggggccagggagccagtggacgggaggaccctagggccacaggcaacctctccacatcctcctgggtgccagcaagtgagacaggcacttgggtccccaccccaaacttctctcacaggcactccagagccaagccctccttccttgtcaccttgagagatactctggggtctgagcccacagtcaggagggtggtattcaactgccctggtaaagaataatggggtgtctggctgcaaggctaggtggagacagggagagctacgcacacatcaatgcatatgcactgttataattgggtagttattaataaagctatgtctattgtccagctctctaatgtgccaggcctgcgctgcacatgagacctgatcatcacctctctccatcctcacagcaagcccatgacagcatgaccaatttggtagctaacagcggtgtgtggctatttacatttacatttaaattaactttattccaatgtaatttaaaaatccgtttttcagttttactagccacatgcccagggttcaacagccacaagtaaagaggggctacagtggtaggcagtctgtgctgtctacatagcacattttctgcatgccagaaagttctatcaaacagtgcggagagcattgcgtgtgcactgactaacaagagtgcatgagtgaagacacacacatgggcatgtgtgactgtcactggaatgttcacacacgcacagcacaagggacacagctgtgcatgtgtttaggctgtgtgtctgtgtgtgcacgtgcacgcgtgtgtgtgtgtgtgtgtgtttgtgtgtgtgtgtgtgtgtgtgtgtcttagaggtgcccagcccttgtccaccaccccaggcatcctgttgcctgaaggaatgtcaggaacaagagctctggaatcaaactgtctggcttggaatgtgggctctcccactctctaactgggtgaccttaggcaagtggcttaacttctctgtgcttcagctttctctttataaaataaagataataacagagccattgttgagggttattagaagcattacatgagataatatgtgcaaagctctcggagaggctcccagcacactgtgagctattaataaacattagctgttactgtcgtttccaagaggcagtgtgtttgctgcgcaggagcagccttggagaagagtctgtcatgtcggggagggcgttgagaaccctgatgagaccgaggattgcttcattctcaagcctgccactgcttcctgagagcagcagggtggggcagggagggagctgctgggagcagcaggggtccccaccggccagggaaggagactccgcagagaggggtgctggggtgaggaggtgccaggaggggaggcacacgggaggtgacgggaggaacggagcaggagtcccgccttagcatgttgtttacagcctggatcttccagtcgggctctgggaaatgtgctgctgagtgagggagagagaaccccgtaagtaactgctccacaatgtcagaattgctttctatattcgctaaagcaccaggccagctattccctcacactgccctctaggatctaaagtctcacctgggaatgagaccaacccacaagcgacaattggaatgaaaaagaatcagagcagaggaggcacctgagggaatcactagtcccaggcagccattttaacacaaatcaattcaacaggtatttgctgagtgagtgcctgctctgggtaaagacagcgttgtgggtgcttgggggattcagaaaagcaaaaagggaggaaggagcctctgccctgaaggagtcgagagccagagagagaggctccaggcctcagcagccaaaggtaagacggctcgggagaggattacacacaggaactggcatttgtaatggactttgaagatgggtgatacctttcagagagcaaaacaaggtccagagaggttggacagcttgcccagggctacacagccagtgaagaatcgagccaggtgtgaggtctttcttccatggagagacaaggaaaaaggaatgcatccctaggcacacagtacagagagcagggcctcagaggtgcacacaggagagaccagggccatcccctgggatgaggaggccgccctcccaccccgccatccctctggcctcccggaaggtccgcccgatgcggcgagaggccgcctgtgttttcagacgtggccagcagagggcaccaggactactgcacaacccggaccaaggagccggccgcctccagagctggattcagcgcctgggactctccggggcacagggcacaaatgtctgtgccccaatcacacagccccgtggggtgagcccatgatgggacaccaggtcggggagtcacgtccgcggcttccatgtggagggtagggctccaaggaggcaggcctggttggacgagagaaatcccaagaccctcccagatcaggtgggcacctcaggttgaataaaaaagttttctcccaggaggagcttgtgtctggcggacataaaatgagtgtattttctttagtttactttcagagaaagcaaagggaggggtgtctccatctgtcaccacctccggggctcatccctgaacccctacagcgaagcaaggaaataaaataaacagcccctgtcaggctcacatgtggagttggggtggagacagcagcctgaaatggtccccgaagacctgtgattttcatgtccttttgcagaggcatgacagaggaaccatgtccttttacagagacccgaccgggaactggcctccctgccttaatcataaaggccatttgaagttagcactcaggttgcccttttgcagaaagacacccccaaggacttgctgggaactctttctcttggatagagagcaccattctcctccgagaatgccaggctctcagcgtgtacacagggccccttcagtccagcctgggtgcgatttcccaaactccaaaggaattgggtccaaattcgatttttcttcttcctgctctgagaaccagcctatgtttggtttgggcagtgacagtttggagattcaaatgaaagtcatgatcaaggtggtgataactgagtgcacagcagaaaatgtaaggggagaagacaaatacaagaggaggaggcaaatgccagggacaaagaggcgagggcacagaagaaagcccaggtaagggctgagtggccagaagggtcgggaaagccaggctgaggatgggtgacctatgacacccgccagtcgtgctgtgggacagtcccagggaatgtgctacatcagatcacatctgtccttggctttatgtgtaggaatcttgtgaagtgagtcagccagcaccccctggcaaggtggggcatctcctctctcccttcgcagagcacagctcacatcactgggaggtgtcctccaagcctccctccaggcctgggagctttatgtgagcgtgtgaaagcctgggccgcctgcacacgagcctgtggctttgggagatgggggtgatggtgatggcggagtgtgggagggagcaagtgcaagatgtgcggggacttgctgcctggggactggggccagggctcctcctgtctcacagtgccatctcaggtgggccaccacctcccccactccctatctgcatctgtaaaatgcaaatagcaatctctgcctcacccatcccacacagatgttgtgatgctcagattaggcaaaaacgtggagaaaaggcgctagcgagcagcacacaggtgccctgcatagacctgtagctggggaccccttgccgagggctgagaagatggctgttgctcaggaagttcccttttaggagggagtgggggagacaggaaagtacaaagaagagagtcagactctagagaagaaagagtttccagtccttcaggttccaatgcaccattcgccctaacacctgtcccttgggactctgaagaccacaagccttaccccacaaccattctggcctgtgcagttctcagctttccctggaaaagcctgtttgccaccccacccctcccatcacccctccagggagtatcctcccacctcccctcattgctccaaacagctgtgattcagagagcgtcatttccagggaaaccaacaacaacaaaaaaatgtccaggcgtcaggggaaatttcaaccacaatgcaagtggttccagaggagcattgatgacacccaggatgcaacttgggctcccagcactgtcagcaccatcctcagaggaagagacataaacaggacatatgtgcaggggcgtggggagggagatggatgttccccaaaaacaggaattaaagttttcaataacatttgttgttcagccacaaggccctcgagactagaggaacccaaaaagagaccaggaaaggttagcaaggtcctttttaccaggaagtgaatcgtgttctctctcgctgcgtggccagtgtggatccaagtagggatctccacactgtgatggcagggctcacctgagcatgctcctctgtggcctggcctcctggtggccgcccctttccccaggggtgctcagggctggcttgaatcccgtgttcagaacgtggctgcttactatcccttcggagctcacagtacatataaacgctcttaagtaatacacgtgtattacctaacggcccacatgtgcacacaggggagcgtgtaccatgtcaagtgatgggttacgtgaactcttcctgctactctcatgatcactgtagactaatatgataaaggtggctcctgaattttgccatatagatctcagagttgtgtggggactgggagctgctcggaaagtctgcaacttcggatccctgggccactgctctttgaaacaggagcaattgtcttcagaatttgttccgtacaatgaattcagtcttattttaacattttgaaaagactgactaggaaaaacaacaaaaagacaataaataacgccaataaggtatgtactgtcatgtagattttaatctaaagagtcagattccacctggtccaaatcatacagaggcattatttttaattccagaatcaccaattagctaatcctccatagtcagggaggatttccagcatggtgttctattgttggagaagacctgggtgcagggaggcccacctcccatccgaggccacacggcagccaggtgcctaggactagccatgccttcagacagcttcaagggtgaggaaatgagtacagaggacagctttccgtcagcctgccatgtagacatcgcaagcctttgggacatggcacctcagtttctcttgcttctactggcagcatcagggttccacgacctggaacagtgctgtgcagccccagcccctgctcgctttcagaaggggttctgtaaacacccggctctgtgaggcatgtcacctcttctctaaggctgaaaccgaccagacaataggccagagcaggaagtgtctgcattcatacccagtcctctgccttccctcccttctcttcccctccctctcttcccctctggccctggggatgtattttgcatcctttaaatgatcttgtttattctatgtgtcggaatatagttatctgaatattaattatggctttagtgaagttcgtcggttgaatgcaggaattgagaattcctccttcacttttagccacctgctttgatttctctgtttatctgcttgactgagctgaaatcagtttctgtaagtgaaagtcggctgcttggagcagatgttaatgctcagaaatagtgtacggtctgctattagcataagtagcatgatgctaataaatagaggtgtgcagggctagtgcagtggtgccggtggggaccgagggacagcggcctgcccagtgacagagcccatgccccacccagaggaagagggagagccccagcctgggtgctggacaccttctgcccaagccagccctgcccttccccctccccagcacccagtatgcagccagctaggggccgatgattaatgacggcgaggactgtaaccaaattgtagtgccattagcaccaagtcacaactgacaactagatacatcatctctgaggtttctatccagctaactaatttaactatgtgaatacgggaaacgccgctctgatgccataaggcaaatattgccaatacccaggagcctgtcagtaaggaatgagagacggggaatccatcggggcccagcggccaggtccacagtcctggctgggtcagcagatctgtcttcacagcatttgcgcttcaaggctctggaataactccaccatacaccacaaggagccaggatccaataatccgccgaaccaagcccccgactccaggaccaccccactgctttcccctgacgtggagatgacaaggtttccttccaagtcagagaaggacagatttggtcacggcaatgcctttctccccatcccccgaatttctccccatctctgcagctccccactttctccaggagagggacatgcaggagctctgatgatatacaggtgggcctccattctcacagtagctgctcccgaaatagtgaatgcaaattgttattatcttcttttttgtcattttacaatgaatcttatttgaaatgtgctgtgtttgctcaccagaagagccttataagggatccttttagaaataaaagaatccttctgccatgtgaatagttgccctttaattcatctgctttatgagcttgggggctccacatggccatgttcttaagccagcccctgaattaccaggtgatttattctctgaatcagaagggcccccactcaaatcacccccctgctgtatgggccaattgctggggaggttgaggggccaagacattgactccatgttagaaactccggattcccaaatttctcacctgccgtagtggaggcaaaagagagtctaataggttctgtgtggctcagcaaatccagtctcctctctggggttccctactcacactcagggaaatgaggacaagctcgtgggataatgtctgtgaaccaagacaggaaaactcaaagctctccagcaatggaaggagacattcgtgcgtaagcagccgtgtacccgcagccgcgtgcctggctgaaactcaagggcatggtatctggagtggctgggccagcttgctggaaggctgcgttctggaagtggccgcccacgccagtaagctcagaagacagtaatggcaacaacccagataattctgggaaatttagcttccatgagagatatccagataatggagatgggaagaaagactttggtgcctgaataattgtccagcacccctctttccagggcagccacttagacaagaactttaggtcactgacagttacctaaatagataatccatgcctcatgtaaagagcactttctccttggagaggttctctcttctcttttcttttgtgtaaaatttgcaactgccttataagtgcaggaattattatcccacttggcagatgagaaaactgagtttccatatatgttgaatacggggctgttacttctatagacaacatgctaggtttatttttgtcagaaaattaacaccatgtcacctgaccttttttttttttaattttctactttgtcttccagaacataaaaagtcaaatccctcacccaagtgttctaatctgtttctctcaggtgcctgaaagcatatatttcctgtttccctcaaagaggctatcatcatttctcttaaatgtctggtctttcatctgaatgctgtttcagatgttaatggggtacagcctccccaaaagatagcatccatccctccatctgttattccacaaaccctgggtgagggttacaaaggtgactgagatgcagtccctgccctccaaatgcctacaaagaaataaagtacaaagccgtatttccccaaactgccacaggaacacgcattcaaagtgccgggatgttcagaagaagaaaggctgtctcctgaggggctgacttggggagctgctgcacggggtgtccttcgatcttggccttgatgaatggatatgattgtgaaatgcaaagatcagcagaagtgccctctgcaaggagaaagcaatttgagtaacagcagagaggtgctagggaaacagtgcaggaccaggtaggccagtggaggacccccagtggacatggtggaaggggagctagcatgaatcatcaagtgtctggacccaaggccaagtaatgtgcgccataggcgatggacagggacacacactcatgcccttccttgagaagatttctcagcattaacagaccagagattgagaccagagttaacaggtagatcctgttggaggggcagggaagggccacagtgaccaaagcagaccagtgccctgccctctcactgccctgcacccaaggaccctaactgcacccggatctcagggtgctagaggtctggtcccctcatgctcagctgcatcctacatcctgaaaaccatgatggaacggcccctctatcctagcacaggacggtgccacttccatgatggaaatcctccattcccaaacttctcacctccaaagacactattggttccacccaccccaccccactctcaagtcctttactttcttaaaggttttgccgttaaaacaaactgctgttattaaataaataattgatttccttccccattttttattaatcaaaggctaatcagagctgcagatcggcatgcggcaaccagtgttagccacacggagtggatataattcttgctaaaagcagcgaggtgctatttttgttttccccgtgcagcctcatcaaggggacatgtgcaatttccattaggctatgtgaagcatcgagaaagagctgggactctgggactccagggcggcaagctcagctaaactgtccacaccctcaagggaccttggggggctgcaaagaagcagtatgaggaccagtttcctgctcagtgaggagtagctggaggggggccccagctgaggctggaacctgggatagaagggtctcccagtacctgtggaggttgtcaggacaggcagccctggcctcagagggctgctctgggcaacgattcaagctgaaccttgtcctggcctgaggctgaggatccccagagccaccgacaagcctgtgacctcaccccatcttgctcttccacgggtgacccccaccccagctcctgcctcagcagataagacacctgcttaccccacccctccctcacctgtgctactccctagcttaaagatactactggcagcatcagggttccacgacctggaccagattcttatcagtcctttttttttttttctaatcctgctgactttttccttcctttctctctccgtctttctctctctctctctctgtacttattgatcccaaacgaggaaaaagtctattaatcctaaacccagagaagattagagatagggccgaaagggcttgtcaggacagagccgcacgggcattatctcctaggaaggtgaccaggtcaccaccaggaggaggaaggggaacaaaggaaaggaagagaaagtgaaacaaaaagtggccaccccagaaagcaaatgtgacccctaccccatcggactgaggggagctatccagtcccagctttgtgcacacctcctgatttgggagatggaagctggggtggcagggggtagggggagtggggaaatacaatgatgattataacccacccccattcttaaagtgtcttgctgggcaggcagcagctggtggatttgcttctcccctagggccacagagactttggctcttgcttggagtcacccacagtcaagaaaagcacggggtgatggcatggtcctatacaatgtggagcagcctactctgactgctgaagccagatgacccaccagagaccttacacaagttccttagcctctctctgcctcagtttcctcccccgtaaaatggacacaatcattgcaaaagcctgatagagttgtggtgagaattaaatgaaatcacctgtatgaagaacctgtgtacacgtcagtcttattatgaataaatactttttattatactttcacccgaagtgcaggaaggctggactgtggccggaagagagtctgactggctgtcatctctgcaggatggcgtgggtagtgcagtctctagggacaatacaaaagttcagcagtgctccaacgctgatgtaaccaaagtgtctggttctgtgcagtggccattgtccattctgtgagtggaggtggttttgtgtgcaaaacaatccaaggaccattcacagtagcccctcaggaccaaacttgcaggtctcagcccttctgggtattgctctgcatagaatcagaatgtctgtgggtgaagtccaggcacgtacatttttcagggagatatacggaggccaaggaaagtcacattccagtccaagctccagtggctgttgagtggtagctggttgctgataccccctgggaatagaactcaggttcctgcccccctaccagcaccacatcacactttccctcaaaaaattcctccctggcttgtctagaagtctgccagttgcttgcaaagcaaatccaaaactgtcggctccccttggctgtaggaaggccaggcagcagactctctcccctattggagcttcctttcctactgccagtcccccagcctctgttccacccaccagtttcctccatttgggagctggtgctgagctattggatgtgccctggtttgcctgctcctccgtgagctccctcatgcagtgggtgtggtatgctacgtcgcgccagacctgagctccttgaggtcagagacagtgtcgtaagcacctcgacccatgcagtctgggtcagagcactggacagatagtgtgcctttgtgtgctgctcaccaggctcacctctcacctctcaggccctgagcagaggcccattggatcagaggaagaagtccaggttacccatccaagcacttcctgaggaccagatacatgtatgatctcatctatttctcccacagatgcaaggaggctggtactatcatcatcctcattttacagatgaggacaccgaggcacagagcacctgagcgacttgcccagtaaatccccaatttgagaccctggttcttaatcctttagtacccacctccacctgggtcatcctaccctagagcctccatcctctgggaaagtagcaatttggggtaaaaaaataataataaaggaatgagctaagagtagatggtttgtttgctgtctattacctacttgaaattatgacaattagcctccaagttaccaatttacagaagaataacagcaaaaaaggatactgctggtacctccacctggtacagtggaggaaaatgctgctgaactaggagactgtggtgttgaggtttttcaattattagtattgttactacaaaaataatacatgcagtcagtaacacgtgcaaaggggtatacagtgaagtgtgattctccctcccactcgagaccccatcccagtcttcagaaggtgcagtttcctgtgtattcttctagaaatatctcacgtacagacacacacaaacacacccacacacactttctgttgtggaaactggaatgtgctccccgcactgccatgcaccttgattcctggctttgcaacatatcttggatctttccaaatcagcatgtacataaatctacttcattccatttagtagctgcatagtattgcattgtccagaaattcactaattgccatagccagaccccccaccgataagacatttaggttgctcctggttttgtgtcttcttttattacaaaccacacacagtcaatatctccgtgagcatccactgcatacatgtataattctacctatagaatacactcttgtaaggaaaattacttcaacagatgtaagcattctacattttgattgatatttggctccagagagactgcaccaatttaagctcccattaaattttctttgttggattttctgtttcctcaaactccttactcacattatgtattatcagaaaatgcttaatatttgccaggatgtgagtttccaattttcccctgatattagctagctgtaaggccttgaacaagtcactttgctctcagggcctcagtttcctcacctgcaaactgaaggtcaggaacctttttagctctactgtctgtgattttaagtatctaccaagtgtctgcaggtgttaaaactgtgctaggaaccatgagttctcctagcctaaaagaacttaaaatctggttggagagctagaacatacccagagaaaatgtaaggagcaacttgggacagcctgaaatcaaatgcagtgcagcttagtctgtgggcctatagaaggtcaggggaaagtgatcaaaggcccagtggccagggctgtcattggaggaggtaaagcatgtgtggaaaaaggaggaaaatgcacagagggggttgactggaaatgaaaagaggaaacatctttatcccaccccgcagccagagcctggaaagccagcctgcattctctccccaaatcaccccacagactgcttgttttctcaccactgactgaaaccaagtgaaacatcaggtttgtctcagagcatggtttgatgttccggttcaatgaggatcagctcttgtcccagcagcttcactaagtagagttctttgtggaaacatcagttcagtttactattctggagggggtggggagtttactacacgtaaaccttgattaccccaacttcttggaaaatggagggttctaattaatttagttttctgagtaatagagggcacaaagggtttgggggttcagtttattccaagaataactttagaggctcgagctcctctcctgcttgggtccgtctgggctggtgacccttctctagtgctggatccaaactcacggccagcacttctcaggtcagttctatggtggctaagttgatatcagggagtgcggctggtatttttggcttctggtgggctctacaaagcacagggcttgctgttttcttcttgatcattgtgctcatttgcaggcgatttagcttatattcttgcaaaggggatgggggcaatgggaaaaccattgcataggttgagggttctgctaaattgatgttatgttatttggggcttacgtaaataaatggcattagccacggtttgttacagctgcagaggctcctggtctactgcccattttatagataaggcaactgaggcccggacatgtcgggtggcttgtttcagagctctcagagaatcggtgtggtgaccataccttgcaaatcgaggttttcataatggacaggttacgtgacttacccaaggtcccacagcccacgaagggcagagttgggattcaaactaggcccagttgacaccaaagcttctcccaagaagttcccagaagttcccagaaagtgcagggacccctttcttcctgccctttggaatacctttgtcaagaaggacgtccagagtttgcattttaaacctaacatgatcctgaggcaggttgtggtatgacaggagcttctctgcagcaagctgccttcaacggttccattaaaacatcattcttatagcattatcctactttgacacaggtggctctaccccaggtcacccacctcccaagcgctgagtagtactcactaggggaaacttgaaaatctaatacctttctggcccctataggacagaaataggaagtcactaggaaagaaggggaagaagaggaagtcactagggaaatcagaaaataccttgagacaaatgaaaatgaaaacacaacataccaaaccttatgggatgcagcaaaagaagtactaaataagttcatagcagtttgcattgacatgcttactcacagccacgcaaatgcaggtcacctctccaaacacaatttttgtctcctttaagggttgcttgtgggttgaaagaaaatgcatcctctaacacccttatgggatgcctcacactgagaccaggaaatcgtcccagccttggccctgctaccatctggccatgtgacatttctttgctgctgttcctccagaggtaaaaagatacaataatttccaccccacctaccttcctgaactgcagggataattgaggtcagtggtgctcaaacttcagtgtgcctcagaatgccctgaagttctcgttaaacacagttggctgaaccccaccccagagtttctgattccgaagggaggtaaggaatgtttaagaatttgcatttctaatagatgcctaggtgatgcccacagagtcctcctacaggtcgcggccacacttttgagaatcattcctctatgagactgtgaacaagggatcttgtgaaaggggtttttaataattattttcgattttgtaaaatgcaggatccttctttaaagggagaaagtaccatttcctcccttcagcataatgtctgatcaatgtaaatgttcatgaatcccattctcttgtcatggaagtttgaggaaatactgtagacccatcagccagtcaccaaggaaccctaacagtcttttccttcccgcccctccccacccctccctcccctaagaaaggtcagctctagaaagcagaagattgtccccgagaaatgtgaaaatatttgctcaagttcacaacctgcttgccctacaccctacagcgcaaacctagccacagacacagaacccaaacctatgcagacatgccgggcagcttccactcccctccccacaacccagaaggccaccccgaagggcgccaggagcaccgctggctcccagtctaggcgtggccatgcctcttctaacacggggctattgtctggagttagaaggcaacacattaaagatggaaaggattcccagaagtcattaaccccaaataagaagggcctcttgttggttcctgctggtgaagacaggtgtgaaagggcagggcctctgaagagagcgacaggccaccgtccctccagccgggccagcgcagtgccatcctcagagggcgtccaggggatagggaaccggagccaccctgtggccagcttaagaggaagggaagaaagggggaggcacaaaaagggataccagaagggtggtcggccggccaagcaagaggcccctaggaaagagaggtggttaacaaaggagaagggaggagggcaggcggagagagaagaaagggagggccgagggcgagacgcttcagggagaggaagcggggctcaaagagcgaagcgggaaaccgagctcgggactggggcgcagccgccgcgacccccgcgccccagcccagcccggctgtgccccattctcctgctgggcgctgcggtcgctgccgggagccgcggccggagcgcggagggcgtatagcgcagctgcgcaccccagcggcctgcggctcgggggatgttcggctggggagcaggggctgtgggccgctccctccgcgttcccgcccttaatggctcggtaattgattggccccgcgtcttattttcaccgcgggcggacggcgccagaggtcggctaatatcaatatttcctacggctgctccgcggtgtggatcttcccgctccggggctgccccgccggccgaaaatttacctttggtttaacaagaagtgggagctgagtcagggattagggcgcgtcaagtcaacacaaataaaaaaagcggggaggtgggaacaggggagaacattcgtcaccgcggggccatcaagacagcctggagttaattgtgggagagaggaggaggcaaacagagacagggattttaaaagaccctggactccttattcctcgggttggcattcgaagccatctgaaatcggccattttccttcttccaccttgtcaccctcatcctaccacccacccgccagcaccaacatcacaggcctctttacagcctgactggcttccctgccttccctccccgaggtggatatctggtcctattttatttaagtggccttttctctccaaccagatatgactcattcaaggcggggagaagaactaacatttatggaggtctcgctgtatgccaggcactgtgcctggtgacagtcaaatattatctcatctaacctccttggaggctccatgggtgcggagcacagtgtctctctgggatatccacggcacccaggcaccccatgaggctcatacacagaaccatctgctgggaggcagaaagcatggacaaatgagtggtagtgacatgcaaagggcaggcgttttgggggctcagtgagcctgagttgcaagaagccacacgctcatttctccaccaccctcctcccaccttcacctctgttgactgattaactgtaaactgatagatcagcagctgtttattaaagacagtgtagagactcaagtttcacggaaaggaaggaccagaagggactggtggcatgagaatttgtgagataaagggctgggaagcctagaaagctccgtaagtggggctcctcttagcaggccatgaggtctcaagccctccccaagacccattccactcgcagcctgagctgcaggatttgctgatgggcatcctatgatgggcctgaatttcccagaggcaagcatgggcccgagttttgccgcctgttctcccagcagtgatactcccccagcaagcctgtctccccagccggggtcaccaaactccttacccttggtcaggattacaggcatgtggctcagggtcccagggttagggacacatggcaggtaccaggtgctgaaagatggaacttcttccttgggcatgtctacccctggaggggtggtaagagatgtgaaggaatttcctgatatcccaaaagaacatctggggcctcctggccccaagagagacctgggggagcatgagaatggatccatgtcaactgtcactttgcaagaaatgcccaacaaacgagcctctgaagacttctggatccatgtggtcccgctgtctgttcctcatcagatatagactattggagggtcccaaccaagcccacgtgaatgtgtgcccagccgggtgcccagccaggtggtaagcccctcagggaaacagaaagggggagcatagccatgcctacccgccccccttgtgaatctggttgtgggcaacgaacgtctccactgcgaaatgatcacagaacaatgcaaggaggcatgacaaagaatatggccccgtggctctccacactggaaatgctgcagagttcagagacagaagcactccgagtcaggggactaatgagggatggtttcatgggagagggtggatgggtagggaaggagacaatgcaatgcccaactctcttgaggcaggccaaacagatgcggaagcctgggagatttggtgccgccccacagggtgggctcagagaagagagaaggaagccagggagaagagctgtggcccagggcctccagcgggctctgctgccctgttaggaggtgtgaaggggtgatgggaccactgaagctcgtctcaaacaaacaaccctgcacccatggaaaattcccctcattgtttcctcagctctcctctcaacgtgtctattaatgtgacaaggatattgcatttcacaggctcagttcattgcccccatctgacatgcacacgtgtgtgtgtgtgtgtgcgcgctcacacacacagagctatccagtcagacctggcagggtctcaatggagagttgacaacattttccccttagagacagttccttagtcctaatttcagtccctcttccatctcagctccagctgggtcctgggctgggggccgggccgcagggagatgcatggtccctgtcatctggagctcacatctggcactggtcagaggcagagaagaattcaccatggtcactatgctaactcttagattctgtatgataagatagggagagagggacaggaaggagcattgcgtgttgcaccagtcaggaggaggtgggactcatttagaaaataatttaagagctgtcctttactgaggcattactgtgtgtgctgggcatctggcttctgttatctcattcaaccttcgcatgtccaccagaagaaaggcaccatttctcctctcctcttagacagatgcagaaactgaggctatggaaggttatgagcagaggttagcaggcattctccactcttaaactcaccgggtgctgagtgacggtaacccgctataacccggcacggtggaggtggagcagacagcaaaagttcctttgagacttaagagaaataaagacggaagctggatttttctgtgcctactcagaagatgcatgagatggtgtcccctgctctctgtgactgtcactcctcaagccttcctgcctgcatggcaggatgaaggacaggctttcacaggcagacgggagaggccagggtcaccgctgcaaaaggctcgcctagtgctgctcctgcagcccagacggttgctctgatcctctgctgaaaatgtcacgtgggagacaggcacgctctgatcttcagagggccgtggtgcatctgtgatgacatgtgggcatcaagatttgcatatttattatagataagctgtcaaaatgtatgttgtcaatttcaccttatactccagatttaatggtgcacgtagaggacagaaaatctttaatattaatattaatatgattttagattataagaccgcattgtagatatcaatcagccaacccttaaggacatgtcactcaagttgatatagtttatagaaaattaatgtaatccatcctgtatgatctattgcagggggcatgaggagagaatagagagtgtggggacttggggtggagggctgggggaccattattacttgccacagttctccatacgtgctaatttgtgttcgtgcctgaaacatcagagaagggaatctgccgatcttagacttggcacggacctcagagatcagcagtgccaactcttccactttgctgtgaggaaacgaaggcccagagagagagtgatagggccacagtcacttggctagttggtggcaggtgtggttgaaggaggctccagagccccctgatatatgtctgtcccccaacccccgataccctcccctctcccacatcccatcccctaggctgtctgggcagattgcttcttcatctgtttgaaaggatcctgagggacccctccccatgccaaggggtctggagggtcatggcaatgtgaagaggggctttcctgatgattgcagaagtgccaggaaaaccccaaagtccccactgtccatcaatctgcattccaaagcctgaagccctggcattgacactctactgaaatcatggactgaacacctactgtgagcatagcagtgtgctaggaacagaaggacagcccagaaatatatgacatcataagactgtcccctctgggtaagaagggataatcccctaaatgtcttgggatctgagtgctctgcccaagccttcataggcctcaggggctttcaaagtgggctttttgattacgggaaccagccagctagacagacagcaccagtggcttctaggctcccggctctgctctcaggccctgttatccccctacccaccctcccacaatcaggaaaaacaccttttttccagagagcaacccgaagcctgttaccctctgccagctgagtcaagcagtaacccagagatacagctccaaaacctgctctttgaatggagcagctatagtgcaaagcttggtcaaacagtgcctctctgggccttcatttctacattcatgaaatggggaggagaagacatgccctatttaactcacgccttcctgggaccgctctctggaaagtgccaagtgcacacagcactctggcctggtttctatgcctctggcctggacccctgctcccctggccaggcccagggcccagcacatgaacagagaggagacactgttccccagagctggggccaggggaaggagcagcctattcttcaggagtcaggctcagccaatttaggggccccgagcttggggtgagagaatgcagccctggtagcatgggatggcctccctcatctctaggcctccccgccttgcttgggtaatgcaagctctcaggaagccccagtctcccccaaggagagggtggtgacgtcctggtgcctaagtgacaacagctaccttctccctcccgttttcccaggtcttaacaaggaaccccttgtctcccaccagtctgccagttcaggaatctgcctctgtcattccagtcccttttcctggctcaggccccctgcctcactgcctcccagaggacaggaatcaggaaagtcctggctggagcagttcatgaccactggagtttatgtacatccacactgcttatctgaagtaagacagtgcccagcaagctccataaatcacagaggtgcagagcatatgcgagccaaggcccaggccactgaggggggacgcttgtggcaggggctcctcagtgactctcctaatgggcccagccagccagacatactcctcgctgcccacagatctcggcatcttatttacatactgctgcagactgacgaacacctgaagcatttttcatcctgttcaaactacaaaagcctcctcgggtacttctgtgttagtgcttccaaacaacggcaaaatgctgataggaggaatttttttttcttttttaatcttccactgaagcctccaagaaagatgacctgcagaagggggaggaaggcgcaaacaaagccagacaaagtgaggagggcacgccatccttgagcacacttctttctcctgggagatgcagcaagtcgggcaagggtttcagtccagaagagcagtaccaccacccacctggctggctcaggaccccccagctcacccccacacctctctagggacagcttcttcccagctgctgttctgggtcatggctgttagaaatttaaagctgatgaacgcaaaccagagtatccaggaagaaatgaaaagcaggtggggttggagggcattcccagctgtggccaggcccttggaggctgcccatctgtctgtgggctctcaggacctccaggtggaagctcctgggagacagatcttacttggttcaattcaaactcaaggattcttaatcttatgctttcagtcccctggaggagggggcagaatgcatgatcagttttcagagcttggacaaccccctgtacctataggcaaaattacttgtgcgtgcatgtgtacataatgcatgtgcatgtatggagacatttttctagaatcaatgcatgttaatgtccatcagattcttaaagggcaaagaagacacctaaaactgtaaggaaccacactgggccatccctggagctgctcagctgtagagctgagggcctcaggaggtagcagactgcccagtgtggggcacgctggactctgcacttagtaaatcacactccaaccccagcaagattgcctgaggtagggcttggggatgggagggtgctcttcaggccccagcagccttcaggagcctagggggctttgtgccctgggagggaggccagaaggacatccaagctcacggtggctctgagcacatgggttcttagaatctctgattctctgttcccccttgcctgcccggagattgttttctctccctgactcctgtctgtttatctctgtgtcaccaatatctgtttttatgtatttttgagtccctttcctttgtttcctccattaatacttctcgttcaggggaggataaacagggtcataatcacgctataaagcgagccacgggctgtgtgtcgcttattgcccaggggtctgctaattggaatttataaagttcaataaaaactataatccaataagggctgaaactcttcttcatttatcttaggggtaatattacgcttgcccgcccaccagcctgcctgccagccagcagtgagaagccagggaggagccacccaaggggtgtcccctgggggccacagcattccctagagtgaccagcactgtatctcaggctgggtggcctggacagaggaaagagggagccttgctggtcaggtctccccatggcccagtgccacccaccagctctggtggttgtgcttttgaggcctgagagggagggggacccccactgttctaacatcatctattgcaccattacagacttacccccagttataggtgcccccctaccatgcaactgcctcacacacaccctgaactacacagcctctggaacacaggtgatctgccacggggaatcctgtgtaagtgcaatgaatcctaaacctaggatggaaggtgcctccttccttgaccctcggaggtcccacagagggaggtgtcaccatgaggtgcacgccccaaccagagctggagccatctttgtcacccagctgtgcctcatcggacacccaccaggagccctttcccagacttgacagtgaaggagacaagagaaggcagggagagggtgccacagccacgctgatgagccatgccctggagacagttagacaggtatgttagacacggggcgaccaactgttctggttggcctgggactgagaggcttcccacacatatgactttcagtgctaaaacctggacagtgtaagatgagagtgacagagggaaccatccaagcagtgggctgagtggtagggaagcagactgagctcagcaccgacagacagctcctggaggaccccgccctgcccctgcccaaaagccaccctgggaaccacatcaccataagccaaacacctgcttgcaagacaccttgcagtttcccattaccttccagaaagcccacacttgaaaagtaaaataaatgctctccaacaggaatctgcctgtaccccagccccaaaagcaaaagctggccctttgctcagacttagctctggacattctctgagtggggagaggggacgggacactcagccagccctgtcttccaagcagggcatggggagggagcaactgaccccacagcattcctggctctctcagtgctaagtagaaggcagaagcctgcagagccagttgcctcacccatccctgtgcttggatggggcatgcatgtgcatgtgcacatatgtgagggctgtgtgatacccagagttgaaggcacggtcccgcagcctctcagggcttcccagtctgcagagagagagaacacaggccatgttattgtcctaatgcagctttttggggagggaaattgtgtcaagtattaaaatggggaggagatcccagccacgtgcccccagagctgagctacacagctaaggagcgcagttgttgggagccagcgccccatgccagctgtgggggtgagccaccctctccaagcccaaggccctcagagccagctacacaagggaaatagctaaagccttggagccagacctgcctgggttctgaattggctttctgccacacatatgtgttcagccttgaataagtcattcatggtctccacatctcagcttgaggaataatgccataaattatataaaatgctgaccacagtgcctggtccacagtagttaattcctggtcctggtagttaattctagctactattaggcataatttatattttgtgtgaaagacccaaatggagataacggtcagtctgtggccggggcgagggctctgtcttccccaagctccctttgctggccaggagccaggctagtgttggcatggggacagcagagttagtgaggactagagctagcagggcccctgacttgaattttggagtcaagaaggaattccaggaggaagcgatgcttaacagtggtgggatgggtggtccaggtggacgggaggaggagcctcccagcagaggaaacggtgtgtgcacatgcctaccccagggccaagaagggagcagggaggaggcctggtctaccagggggcaggaagggatgttgggctctatgattaggatgatgagaagccagtaaataatattttttgccagaaaaaagcagtttgctatctgagactgaaaaggtctaataccctaaaccctctgaatccatctacagcctctccacaccttcaccagaccctcatcatccacattcattcattcattcactcactcactcactccaccaaagtgcatcaagtgcctccatgcacccagcccagtctaaatgctgggatgctacaatgaagaaggcaagtcctgctttcaccgggatgaagtactctcatccagcctggtctcctgcctttgccctccacccactccagcctttcaggatctggccaatgtcctccagcccctctgcgaagctccatctgtccttcccagtcagcacttactggctcttcttggtggagaaataaaagaagcaggacaccatgcccacacccccagagctccccatgccccagctggagggcagcacccttcagttcactgctaaggcactggatccaccgccacccttgataccatccctcgggtgggtctgttcagtgtcccagtcaagctgtgagctccacgagtagggaggcctgtctccctccagcgttacggtcttgatgcaacctccgctagttaagaaagcagagtgtgaccattgctttaggcctctactggaggatgggccaagaaatgccagttcctaccacttgtgttcaggaagcctaggcctgccaaagatagaagggagaaagacccttgataggatgggatcctcaaggaaagcactggcagagggtagccaggctggggagaagctcggggtcagacaacactgcagagcagccaggaggggagaacttgttgcaccagggagggatgaaaagcaaaaacagaaaagggaataaggaaaggcatttagggaggcaagatgcagtgtaatctgaactgcaaatccccctcctccaggctccttaaggcttttactgtactataaaaaccactgccgaacagcaagcctgcttgatgacaaagagagataattggctctcatgcagatttaagcccagagttatcaaataataatagcactcagaaagagacacaggcaaatgggcctggagagcccgcttcttccaaaggatgaggatttgttaaaagtatctaaattatgttcccgcaatggaacagggaaatggggcatttttttaaaaaaagattttcttttaatgcttggatacatttttaaaagttcctttataattagggctgtaatttatataatttatttttaaaatatcctttttttaatttccacccggtccagttaaagttgaactgaaaagcccacagtaaatgatttttttaataaacccatttaaaggagccccaacctgaagcagaatagatatgtggattttcaaaggagagggggaaaaatcatatattgaaaaaataaatttcctaacccattttataccccagattttattatcaccggaaggtttttaaaattctaattccctttgcttttctgaagttgtttgtttaccgcccaggcctccttgagcttgggaccgggagctcaattggttggtttcagtctcctccaattcctcgtgtgattgtctgttcatgtgtctgctttgctcttcaagggggctctgagctccctgaggtcagataccaggctctcggaagaaactcttttccttctcatcagcatccagcacagagccatgcatgcaataagtgttcaataagtgtttgctggtgatgtgccatactatgaagaagtcctaacccatgatttccatgaaagccctgggccagaaaacagtgttccttttgcaggaagctttggttcccattgtaataccctcgtcctaggagagagaggggaagagggccgtactttcagctgttagtcaaggacccctcagatgatgggagaagtggagcagattaccttgaacaccagggccagagaggatcagagcctctagttgtttgagatgggtcagggtacaggaaatgcagaaagaggtaccagggacccagtgctctgctgaccagtagaccagagagatctgtgtctccacatttctagggacttgccctgagcatctgcgtttgctggacttggtagagccatcacctcagaagtcaccatcccacacctctgtcagaaggtatcacacacacacacacacacacacacacacacacacacacggcaccacacagaagggaagagggacaaaattagggcctcatggacccatcagaggacaacacaagagaggtagttaggactgtaactgctggagcaagacaaggcatgcagaagttcatgaacccttcagggaggctccatagaggagggagcactggggattggcctgaaagtacaggttggataaagataagcagaaagtgctagggagggtattccaggagctggaaccaggatgagcatggacaatctggtaggaatgagcaggtgtgtctcaggaacagtaagaagatgttcttgacagaagcttagtaggtagagctggaaagagaaggttggtgcagactaaagaggccctggagtgagtgaaagaatggagacatcaaatccattccataagaatggtccacgcccctgcccagtagctctccatgcctttctctttggaaagtaaagctcagaccagaggaaacccatattgctgccaatccatggacacacatttgctgaacacctgctggacacagaggagcctgtaagaatgaggctttctccaactctcagtttgctcacactgtgcctgggagtccatcccacctcccagatgacagacatggattgaaagagaaggtcctgcatgtggcagagtagggatggaccattagagttggcagaactgggagacactttctagaatgggggataccacagagttttccttggaagacaaagcgacccatattgaggcagggaacaaagggctgttgttccattctcagttcccgcagcagcaccacacatgactggaccaggtggttggtggatgctagggaaggtcatgggtttcaactcttctcccaaacctctagagaaggcacttttctcactttcgcctgggtctcctgtgcccctgagatccaccatgcatctcccagcctctgagaccccacactcctcaaaattcccattctccagctctctgctgtcatccatgggccctgaaggccaatgacacctgcagaactcccgggagaagggtgtttttacaaagacaagggcagagaggagaaggaggaggaggagagagaagaaagaagaggaacaggaagaggaggaagaagaacaagaggagaaaggaaagtagaggagaaagtatagaaggactaaagggaagaagaaaaagagaaagcaggagggaagaaggagaaaggggaggaggaggaagaaaaacagaaaggagtcaaagataaagaacagaagaaagaagaggaggagaagaaagagatggagaaggaggaggaagaagaggacaaagaggaggaggagaaggaggagaaagaagagaaggaggaagacgagaaaggtgtcaagataaagggtggaagaagaaaggacaggagatggagtaggaagaaaaggaagagaagaaagagaaagaggaagaagaggaggaaaatgaagcatgaggagaaagggaagagaaaggaaaagaaggaaaaagggggaggagggagaaaggaaagagaaaagaagggaaccggaggaagagaaagaggaggaggaaagaagacaatgccttaaatggtgcctgggctttcagagaggccgcagctccacggaactcatcttggagggtgggtggccgacacggccccatcacgctcagcacatggacattggcctggatattatgaactgcagccaagagaccaacagaaaacaagaaaggtggctgaagagtgacttgaagacagattctcttccaagggccacaggaggagggaaacactctcgccccctgccccccaactgtccctggccctcccagcccagcgaaggacagcagagcactgggccccagactgctgctttgttgccaaggaaacagcaattactctgtgagttgtgtacggttttttctgtctttctttctttctttttttaaattctgggcctgatgaactgcagtcgtggctgccccctcctctatccccacccccagccccagccgctgactctgcattaaaggtcggaggggctgtaacagttgctttcagaaatgacagatgcccctgcttggggtaagcatggtaggagagaaaccatttgtcaaagtatttataaagtgggtggagatgctgaagttgtattccctccagctttacaaaaaagaagaaagaatgaaagaaaaagagcagagagcgtgagggaaaggataaccagcaacttatcccacctacctcctgccttaccactgggagatgttgactgagcgctaagtgctgccatggatgcacagatgaagaagcccatgctcccactgtttggcgctcacagcaggaggagattcacatctgggtagtcaatggcagtgtgaggagtgtgtcgaatgggtatgttagaccaagagtgtcacaggctgagtttggggaagggagagtgaaatgtgggtaagcgagactaggattcaagtcctgagggaggcccaggctgagctgggcctgagaggagagcctggggaatgccaaggactttggggctgaccttgatgggctagagccttgtgcaggggacccggacgcggggagacccaaccgtgccccaggaagcttggcttgccggaagcatcaaggctcacatgctcatgagggcagcacacagtgggcacctgaccgaacaaagagcctgcctgtggagggcagctgatgcatacctgtggcaggatgggtgagtgagtaactaaggacatgcaaggtttcggcttccaacacgcaaggattttaaggaagggagaggttggtgaaaggtcctgaaagagaccatcctcccctttatttattcatcattcaatcttttaacaaatcattacagagcaccgctgggggatgggggacacaggaaggcaccttctggtggggatggtgatgaccaggaggtggggtgatgggtgacaaatagtgcccctgggtaatggcctagaggctgcacaagttactctatggaacagaaaacagaccacccaggaaggcagagctgcctccagaaggccacctccaatgtcactctcaggcacagcccctgggtcagcactgactgttgacacatcttcttggatgtttctgttatgtggtgaaagggggagcatgtgcacggctaagtggaagcacctggagaaggaagggaagatgtttccaaaggaagccctaagagccaaggagaaaacagaagcccagggcagagaagttactgctggaccatcctacagggagaaactctggcaccatgaagtccaccccctcagaccaccaggcatgtagaaaggcggggcaagggccaagggcaagtcgagtttcattctgtaagtggggagctcatgatggggcttcagaccatcctggtgaggtagagagcagagacggattgcacagggttgcctctagaagtgagggaaacctctgtggctgatggaagcctgctggggtcactaaggaagcctagaggagcaggagagctgagacacccaagtgccaaagagacaaatctgcacagtggatcaatgccagcttctggggaagaaggcaggggtccctgcagcagattggccagctgggtccaagtaacattcggccaggttgagcaaggagaagcctggcatgcactgaggaactgtgcactgaggattctgggctggaatattgcaactcgtggggcaggaggagggtaaagttgttgtgctttagtgtattcatttcccccatgctttcttttctttactcttcttttctcttaaacattaaccacattacagtgtacaattcagtggcatttagtaccatctctgtgttgtgcaactatcatgctcaagttctgagacatattcatcatcctagaaggaaaccttcgtgtgcattaggcagttataccccattcctacctcctcccaatccctggtaaccactaatcttctttctatctccatggatttacttattctggatgtttcctataaatggaatcaataatatgtgacctcttgtgtctggcttctttcactgagcatattttcaaggttcatccacactgtagtgtatgtcagaattatcttcctttagatggctgaataatattccattgaatggatataccatattttgtttatccattcataagctgatgaaaatgtaggctattcctactttaggttttgtgaatactgttgctgagaacatgcatgtacaagtatatgtttcaatacccatctttaattctttggggcatatacctaggagtagaattgctagatcatacggcttatgccttcttattgtttgtcaatgtccaaactgacttgtctgtctcaaggtccccaccttgattcagatgaactcaatactcattgagtgtctgctgtgtcatgcaatgcctgctctctctaatcctaggggcaaccctatctgatcagttttattctcattaccgatgacaaagctgaggttcagatagatcaagtcttgggtcaaccaaatgaaagatgccagaaactcagatgccaattcctggattttttcaccacacacacatggctttcccacatgggtagggcacccagtgcctggatgtcctagcttcgtggtgcttttctgcagaactcaaaatacctacatattataaatttagatcaattccatgtgaaaatggtattctctagagtctactatagataagtggttgcaggtgctaatctttgttttcttttcattagaggagggggggatataaagttgataacattcttccattaaattaatttttgtacaagtgatttggggaaagaaaagctgaagtccattttgatggctgaacccttgagccctgtctgtgggagggagactgatgacatcccagaacaatcgagatggggctttgagctgggaagaccacattagggcaggagtggtgtatgcagacgtcccaggaggcagaagaacaggttgaggcagaagagaggtgacgctagtgacagctgagctgccacagcagagatcacccttctctctccaagcatacagatgctagatctcagggtttgtgtcagcacgtgcacagttaaactggcttggctcagagggaagaggcctccatcctgcttccaccacccctcctgcttccccagctagaaaggaatggttagctaaggagaccaaccaatggccgcaaggggggcttcaggcccccagtccaccagaccacttgagctcacagcatgaccttgagcagcacacacagagatgtgatgggagcagctgtctcatgtcccctgcagctgcacctgtggcatttgtcagcgtggagaacaggcatgccctacctatgcatgcctagtgccatccatcaacccagcaggaggtgaggggggtgcctctccatgcttatttcagtagctctccacctaacccccactccgcaaaagacctcagctgctgagtgtgtgatgagaccacagcccaagacctggacacctgccctgtaattctgtcaggcaattagcacagcaaatgggcccagaggggcctgcctctggagagtcaccctcctgcctctgcacgctctcccctggctcatcccatgtcctgattccagactgatgatgacacagacatgccactgccttgctagcacttaccaaccccaatctccactggcacccacagcttccaatgtcttagtctggccttagagatgcggtgatcaagcccagcctgtctcatatgccatagcaactcagtatcagacttcagccaagccagggaaaagaaatgggagaaaggagaggcccagaggtgcctggcagggaaaagcggagaggaggtaacagctcccaggaactgcaggaaacacaaacttggcgagtgatggcgaggtctggacctgggctggggcaggggctggtggagaggaggaatccactttggagatggctgtggggtaagtgaggatgaagggggaggaatgtagaactgctgggtttctggctcgggggtgctgatcaccagcgtggcagaacccaggaggatgggcagatgtgggcacataacaggggcctctttgcacaagttaaatgtgaggggccctgggccctcaggcattgtgttcagcaggtggctgtgtgtctgagagatgagaactagccatgccacagtgggagccgctgtgattcctgtgaaaacagtgaagtaggggacaagcagcccagtataaacccaggtctgctctctcacagctgccttctctaggaggagcccgatttaaagtgatgccttgaacactgagatttgactaaggaggatggcagagagcaatatcacatagcaggcaagcctgagaagtgtgcactgattttagaggaaatgggaagtcatggaggatttcaaagcaaggaagtgacagatcagaacctggccttaggacaatcactgtgctggcctgaaacagagacgctggaggccaggggatgaattaggaggttatcagaccagagaagatgagtgaggagatagcagacaagaacatgcacagagagaggtgagatttctgtcccgaataacaacctagtaaatcagttctagacaaatacaaatgcacccatctaaggtgaggggcagaagagaaggggaggggcctcctccccaccctgttcctagcactcactcagatgactgtcagggtctctgggccttgagcagtgactgaggggagcatatgagaccatcgtgctcagctgggatcatggtgaacgccttgagtgggcaagacagttctccagcagggtagggaaggcaagaagcagcaggggacagagagagagccctgggtcacaccctgagacaccctcctggcaactgtgactttaggccaacaattccatctctctggctctagtttccctcacctgaaaccatccattcaagaatgtacaggtttcctcactccttttcatctggcccaaggaaacgagggtgcctgaccccctcccagctcccggaaagtgaggagcagatgagacggaggatggaagggagcttaggaagcagaaaagtgcccaaggaggaaacaaacttttcaaagttagaagagccataaaatgcaaggcgcgatgcttccccccatttcccagggaagcgccacattgcgtttaatggcgctgctgccgttgggctgatgtgcagtgggagtcttttggggctggagagttgaatggcaaaggcaggcaggcaggagcattccaggcctgctggatgtgggggccttgtgggcgactgcagctcaagttcagagaggacaccaggcccatgtgaccgcaggagacccttccagtttgcccaacctccctctccatctgccttcctgggatggcatagatgggctgtaaatgtgtcttgagaagtcacctctgtgcccatgaggtcacttgtcctggcaacagcacaagccagccccctgttggaggggcagatgtagagttagcaggtcctgtgatagcccatgggcttgacctacagggagctggctggtctgtccacatctccacatctccctacactgtgggattttttggtcggctgtgttttccccaaacaagcctatacaattagtttcttcttgtttcctaaattatttttgccactgctaattatttcacactccatgtacaagagttattggggtgggtaatgggacgcaagggatggctttgcaggagcatcgcgggcttcaagacacgaaggcaactttgatttgtttttctgctcagccacccgcctgagagaaggaacagagaatgccaaaagaacaggggggcggcgttgggggtgggaggggagcggggagaaacaaaccagggctgaggctttgaatggcagctcctacccactactctccctgggcctgggaggggcacttgcccgcagatcaaggccaccaccctcctgtcccatggaaaagacgtgcctcatggaaaagacttgctccagtgtggttctgggaggactgggcaatccagaggacacttctgcttaatggcatcacaacaggaacacatgtggggcctggcagtgtactgggagcttcacatgtgtcacaacaggcctggggcacagttcacactatcgatccccctgtagagtctgggcagtggggctagagaggttaaggaactcctccaacatcacatagccaggaagtggtagagcccagatgggattccaggtctgtctgatgccaaagcccatgtctctaaccaccctgctcccctgccagccactgaggtcctctgttcacaaaaaggctggggaggattcccctgggagaagggcactcaccttaggcaggaaggacttggtccccacaatcaccccacctggccctgacccaccgacgtttcggctcccaaaagcccactgtgcctgaactccagccaggatagttatgcccattcccatgttcccctctaggcagaccccatggtggatgtgaccctttcagcttagctctgctgaagggtttggagcttttccaaagaagattaaccaggaatctaagcggagatgcaaaactagaaaatagaaaagttgctgaaagaaagggagtgtggagacgagactgcttcttggaagctacaggttggcctggctggccccagtcaccaggcccatgggtcaagcagatgtaagttggtcatcaatctggcctcagccatgcgagacaccagtcatatgaggacctcacttccctctgggacagttgccccctgcccctgcttctcctaataggacagttgccccctgcccctgcttctcctaaccagagaaccccaaggcacttctcctgcctttctcaggctcagccttggtgtcctgcagtggctggaggaggatgggctctggccagccctaggactcctcttggccttcccgtgctctggcccaggcctggtggtcaccatcctcactggccctcaaattgtttgtggctcaggcccttttcttttgtaaagaagcctcttgccccagccagatgctgagacttactctgtagatgccaaattagatccataattccaggtagcgctctgacctcacctctcgaggatctccatatttctcacagacacgccaaaaaatgaaaatagagccagtggactaagtgagaaaatgtgtgcttagtgctaagcaccgcccctcgcccgaggcagtgcttcattgtgctggtggtgactggtactctctgattactgagagccagccctgcctgtacaccaggcatgtgtgttctcacttaaccctcagcaagccagggaggtaagtaagtgctgctagactcctattttacagacgaggaaagcagctaagaaacctgccccaaatcacatgctaaaaggaaattgagccaagcaatgtgcaagccccatccttttttttttttttttttttgagatggagtctcactctgtcacccatgctggagtgaagtggcgtgatctcggctcactgcaacctctccagagtagctcggattacaggcacgtaccaccatgcccagctaattttgtatttttagtagagacggggtttcaccatgttggccaggctgatcttgaactcctgacctcagaagatccacctgccttggcctcccaaggtgctgggattacaggcgtgagccactgtgcccggccgtaagccccattcttaaccataccatctgaatggaaggggccaggctgcacagatcagctcattcaactccattcctccctatacataaggccacaggcatccaaagaagaaaagtggcttagctgtgagcataaaacccacgttcatgatttctagcccaggtctcttctaagagaaagctcttccaggaactcccatcctctcctggccccaggaggggctctctggaagccactctcttggccctgaatctggttgcttcttactggagaggacaactgagccccggccttacttacccactccagatggggtcagggaaggaaaaggagagtcttgggagagcatgaagcagagtaaatggaacagggaccttgaaggagactgcctgacattcaagcggctctcagtactccctgctgccatctcatttgaagccagcaccacccacccatgtaagacaactagggcaggactcagcatgcccatttgatggaagggaaaactgagacccagagaagtgaagagatttatcaaaccttggtggcagaagtggtgctagcaccccttttagtgacttttctgagaatgtcttgtcctccacgcatgagtctcagaaaacagatgctaagcattctggggaggtgacttgtgagctgggaccttggcttggagtgtccctgggcacacagctaagcacaggatgtggaaggggctcttctgagggaggaagtagctcttctgctgactgggcaaggttgggacagcactcgtgactcgacagcaggctctgggcaccacttgggctttgttggctggagtgccagccacgggccaggagtcataagagctcgccgagcctgccctcaaccttggtaaacctcatgggaaaatatattctcctattctctggctgcaagtgctcctggaacaggggctgagcgcagagccctgggctgacctttgaggcagacaggtgggaaagaatcaggcactgccccagaaccatcccaggggaggccaggggagagaaagcgcagtatctggcctttagacacacacacatgcatttaagtccaagccctgcctccccctagatagtgagtgaccatgagcattccatccgacccctctgtgcctcatgggtatcctctgcaccgtggtggaaatgtcatctgctcacagatgtgtgatgatgcacccacccgacctggtactgtgaggctctgtccctctagtgcccatccttctttgggcagctaatgcaaaggctcaattaggaagcaaggaaagcagatccgaccccagcactgggtgcctgggacaggcctctagagttgagaatggagggaatcagcgctacctagagggcttgggagggctgcctggacgaggtgagatgttaccgaggccttggctgattggtgggaattcaccaggcagagagagggatggggcccatccttagtgaggtgagacagggagctgggcacaggccaggcttgcagaggcttgagggagatcagggagggaaagaagggaagaaaccctgcagctggcaaggggctgcctttgctccccaatggtgcccagcagtgcagtggggcccgggccacactcaggccaccaaaagcagatactagccttgctggaggcctgagcctttctcctgggccactgtcctgtctcatgagatgccctgtaccaccttcccggtgagagatgattacatcctttttgaaaaataaagaacaggaggaagaaaagaagcagagccctccctctcctttctccctcccactctccctgcccccccttccttcctccctcccgctcttgctctctgttgctaagtagatggtaggtttatttgcggctgtcggttcccagtagaaaaatttcgtcttggagagccgcctggatggaaatggcttcagcaccgatttcatggagaaggtctgtgcggtaattagtgttcatgagggaggaattggactggcaggctcccaagaaaactactccccaaaagttagctcgagtccagagggctacatcaaatccaattccagagtgcgcatctcaaccgctatatttagacccacagacgaagcgggcagctcagtggctcgaggttcacggggggcctggtcatgggaggcagaggcagcccatgctgctgagaccacgagtgatgcacaaacatgattcagccgagggctactggttctcccttagccccatgtgtgtcctccctcttcatgccccagcttccccagaagagaaccttggtgagagaagggggcaaatggagagagaaagagaggaatggaaggagagaggaaagcgggaggcagcccgtgctggtcaacgttggagtgcatttctacagagcacactggctgactgcaaatgcccactgctcctccgagtcccacacataacttgttcactccaaccactgcaaggccctcccctcctccttcttcctacctacctccactgaggcccaggcagcctgcccagcctccaggaaggttccccagatgccctgtttctgtctatggcttcctcaggcctctacagtctgaagcttggttactgggccacacaccagcttacctggcttcctccatatccctctgtcccaggcccatccccaggcaggatgcccctgaggtcaggtggtctttcttcttctatttccctgccttctcttcccaggccagggctgagcaattaacagataccccagacacttaatgatggaatggagacccgcaggccccagagggctgccagggtctggggctccacgttgtcccacctgagccctcagctgaaggaagaacaagtagaagcaagattaaaagccatagctctgactcatccttcccactttcattctctggaactttcccacatcaacctgcacttaagcagagattttatagataaggtggctaggccagggacctgacagaaggaccctatcctggcgtctgagctaacgtgcagcttccaaaccagtgtcttgtcacaatgccatgctgtgggggcctttgtgcccagggtctccctatggttctgcatcccggccacccccaccttctctcactccagtcccagacctctgctctcagctggcctgaatccttggccatggcccacgtctctggcacaactaaggcctctgatcagccccacacctcacaggaagggtagagctgggggtgagcctctgctcagcctcagattccaggcaggagaggcctcagctggaccttctatccacctcaccctacgtgcttcagcctccccagtggggctggggtacattcagcttagctgagacacagaaaggttctaaagaaaatgaccaggtgtggtggctcacacctgtaatcccagcactttgggagaccgaggcgggtggatcacgaggtcagcagatcaagaccatcctggctaacacagtgaaaccccgtctctactaaaaatacaaaaaaattagccaggcatggtggcaggtgcctgtagtcccaactactcgggaggctgaggcaggagaatggcatgaacccaggaggcggagcttgcagtgagcccagatagcaccactgcactccagcctgggcgacaaagtgagactctgtctcaaaaaaaaaaaaagaaaaagaaaagaaaagaaaagaaaatgagctagaaggcaaagagaaggggtaaactgagggcacaaagacaagatgtactcagctgcaggagtcggaagaggtgctaaggtcaggctgcaggctggctctgcctggcacagctcactaagcctgggcctgggtctccacaacacccctcctcggccctactccttcccatccctggatcctctcaaggtgaagtgaagacagagaatacagccctatgcagctgtcgaacttgtgagcattgcacctgtgcctccctctctccccagccatggctgccgcctgccgtccacccaggcaggggcaggggcactggctgcactaggcctacacctcctcgcatgaatctgttctcccgattcccttccatttggtgcacagccttggagacacacctccatctgttgacttacagtcagcttcctacacagtttgtctggcttgctctccctttgccagggcggcactgggctccccagccttactcaacccaggagaagggtggtgcacctgagctctagctaccgtactgaccagatgtgtgttctcgggatgattgactcgtgctcctttccctggtgtgtaaaagagggacgtgtacttcccatgccccactcctccactcattcattcattgatgagtctgtgccaaggacccacttggtgccaggactgtgctggatgctgaggacacagactcatgggtagggatcatcaaacccactttacaaaaaaggaaactgaagcccagagagacctattgacctgctggagccctccagtcagcactgtcatgcaaaccattgaccatccctcaccccatgcttccagtccccatgccaggccctgtgccaggagtagggcagacaagaggcatgcagaggggccagccctgccattgcagagctcacagggtccgcttgagaagtcaacaggtaacacggttgagagtgctcaatccacactccttcccttcccatgagggacctgccaccctcttggggctccccgtccctcccaggctgtcccctctcagtgctgccaggaccctgttctgctcctgtgtggagatctgcctcctgtaaaccttgtctgcaacgccccaactttcctctctccagccctccccagcccacattcccaggtcttgacaattcctctcacaaaagaaacaattggcactgaggtgcctctttggggatgcatgaagccagctctttgtcacctaggcccctgccagctcattaccgcctcctgtcattagcatcttagacacacacacacaagggaaacaaaacacaccagcatcctagactctctaagcaaaccatctgtcgttctgagccccgacacatgctggcctgtgctgtacaggaagtgcaatgaggtccctgtcccctatgagtgtgtatgagtgtggttataaccaaagaacacacacaggtcctacaaaaggaagcagacaatagacagtacaaaggccaaagccatttttcacactgtagggaatttaagcatcacatcacaactattactacggacaacaacaacaagagtaacactccccattaattatatcccaggtgctctgctgggcactcaggaccccagcgggtgagtgtcattatccccatttcacagattctggaagagactctgtaaactaccccagggctcccagaagaaagcagaggctactgtcatagccagacccacctccctcccaggccaggtgcaaccctctcccggaactccagacaccctgcggatggcagcaatcaggccacaggggttggatggctttctcagagtcaccagctggctggtgacaggaacctcaaggtcccatgttaccactgtgtagggatgggaaaaatgctgcagcctgggatggtcgggggaaaattaaataggtggacaagagataatataggtgctagtcatgagacaaaacagaatgacaggaagggagggagggagaagggaagggaagagggaggagtcaggcaatggaaaggacataaagaagaaagagaaaaggaagggaagaggaggggaggggaagaaaggggaagggaggggaggggagaagagggaagaggagggaagagaaggggagaggatggaaaggagggaaaggaaaggaaagggaggggagggaagggaagggaagaagagggaaggagaggggaggggaaaggagggaagggaaggggaagagaggagaggaagaacagaaagtgagaaagccaaagaaagatgtttaggaaggcacctgggggagctttgaggagatggtgctcttacaggctccagcccttctaaaccactccagggcccccaaacccactctgttcagtctttgcatatgcagagctttgccctagcacacccttcccttaaggccactctgggttggtgattcactcaggtgtccctgcactgagttctcccccaggcagagttgagtaacctccttctcaaggctgcagagtccagagttcaggacatgggctctgcaggcagcctacccatctcacacactggctctatcagggacctggtcacaagatctcgggcaagtctttaatctttgagtgactccatttcctcacctgtgaaatggggatgataagtctattttatagacttacattaaatgagtcgaaacatataaagcccttagaacaatgcccaaaatacaaccaaaaatcagtgagtgtttgctgctatcatttgtgccaccaataggccctgcacaaactttggcttgataggtatgttggttgcacactcatcacctggccttccaagcatgcttaccaattgtctttcttttttctttttttttttttttgagacagagtctcgttctgtcatcgaggctggagcacagtggtgtgatctcagctcactgcaacctctgcctcccgggttcaagcgcctctcctgtctcagcctcctgaatagctgggattacaggcacatgccaccatgcccaactaatttttgtatttttagtagagatggggtttcaccatattggtcaggctggtcttgaactcctgacctcgtgatctgcccgccttggcctcccaaagtgctgggattacaggcctgagccactacacccagcaccaattgtctcttttaaagcagggggtatgtctttcatggcaaattgtggaccatcaataaatggttgcgaaatgaatgaatgaatgaagcatcttttcactccatccacagaagacagcacctccaaccccagtcacatggtttgttgggtcttgtgtaccagtcagctgataagttggcttcatttctctcttggtgggctctgtgggcatgtgggtggttctctgggaaaagaaactttagagccaaatgctaggctctgtcttaccccataggccaggctccccatttaccaactcctctcacccaccttgggcactccttgagagtcagcaatgattgcaggatgacttggaatagctctagcccttcccaggaccggggccagctgcctctagagcaaaacccagagcccctacccctctgaaaaatgagaatgctgcttccttagggcccctctggatttgagggattgactcattgaggctggcgtcccagtcacagttgctaactccttcttcgccgcagccctcaggttaaatattgctaaatgcctgtgattgaacttaccgtattgatgttgggtgcagcccaaagcccggccagaacagtggcttaaatggccaagatcatgagagaaagacaccctctatcgacagctggactgtggcctaccaggacagtgtgagattgtttttcttcttttaaaaagaaagtcacattttccaaacattgatcctgtaatatgggactcctggctattggtcttttcaaaatagcctgtcttggatgctgaggttggaatttcttggttggtgtgcttcttttttaaaaaaaatttattgttgttgttgtgttgttgttctttaagtgaattagagcctgttaggaagaagccagaggacagaggcgagattatttcacctcaccaggcaggtcctgagtgccaccatgtgaccagaccctgcaatcaaagaggggtggacacaccctcccctcctgaattttgttcagctcaacccagctactcttatgaaaccccatcctggggcttggtaagggggttccagagaagaggtccagccctgggcgctgtggtctagttgagggacaggattctcacagatgagaacagcagaaagctgctcaaccaagcactcgtttgagggcatcagacattttcgaaggagacccagcaagggctgagaagctgggagggttacactgaggagctgcagcttgaacacggttcaaagggttggaggatctgatggagggcccaagagtggggaaggcactccagacatgaggagggaataagaaaaggcccacagtgatatggtcacacactgctgggggagggaggcatggcttggctgtgtgacccaaagggagggtctgtcctaagaagccacaaagggactcataggtccactgccttgctgttatgatctattctcctttcatgggagataagagtcagagaagcccatcgcaccccccaaaacacacacacacacaagcacacatgcacacaaatcatgagggcagagagctgtccctgtggatatatcagggagtgcttcaggcctggggatagggatggggacttcagaggcagcctaaggacagagtcctctgagcttccttctgcatggggaaggcactccctctgtgaaaaatgacccccacctccacttcaccagtcccatggccatgaagagctccagcaaggggaattctctgccactcactcggcaagtatttgctgagctcgctgtgcaggtataagacacacacacaaccaagcaaatgacactagccactggagcctcagatggggcatggtgtgattcttatgtgctgaggaggtcagggtgtcaggccagggctgagccatgtggctgaggtcagctagtgaggctctgaagttctgaaaaaacaggccaagagggagaaggaatccaggcaagggtggaaggagtgaggcagaggctcagaagctgttggagaggagggaggtggtttccctcccaaacaagtgaagatgcctagcttcatcggggaccctgtctgtcgcccatatcacgtaatttagcgatggttttggtcttgccaaggaggcctctgagagccccttccactgtgggccgtccccactgacttgagcctggcttctcaccctggtctaagagaattcaaacaggaagatctaaactcccctaccaggttcatcagaaaggaacatagttcagtttctaggttctagcaaagaatttatcctggcactcatgtgaatagcaaatgccccaaatgcatttgaaatccacccttgatgctcagctagagacctctgcagaggagcccatggcatgcctgcctttgacatttgaaagggcacctgtgatagaggaaggacaggcaccacctcagctgactctacttgggtgtctgcgggaagaagatgaggtcacccttgagccccttatcccaagagaaggccacaggattgggggtggggagggaggacctctcccttccaaggaccctcgtgtctccctgagcatggcccgtcctcacactgtcctcagacactgcctagggctcctggaggggaaagcaggaactgagcccaaaaatagccatcaggataccagagtctctgctctcccactgtggccacatctcagggcctctcccagtctcaagcttctgagctgtcagatgccgacgatacgcaccccatcccgagcctatgctgaggtgtaagaatggtgagatcatgcacatgacagcactctggcaaatcaaggccctctgccaaaaaaacacacataagggagcaccctcacgctctcctggggaccagtaggagctgctggccagagaagaggtacagaagcaagcccctggctgcaggaacaaagcccaacaaatgtggtcagctgagcaggcttcacttctgcaagcccaggttggaaaggctgacacccaccctgggccagtccctactttcctgaacctcatgggcccatcagccctgaccatagatggaggagctctttgctgaaaagggggacaggccatcaatatgtcacgtccactttgtcttttttcacagtgctataaagatggagcagccgacaccagacatgtaattctcaagcttttagggcataaacaagggcaactggaaaggatggacacttggcaaaggacccactggctggttctttaaccctctgaggtctgcacctccttgtccagagccacttaggtccctcggtctgaacacgctgccctgagctcagcaagaagagaaagagaaggtgggtccctttcctgggagattcaaatctagcttgaggaaaatctggaccaccccagctctgtgcacatctctgtcttgtgggtacaaagggcagaaagagtcacagtgagccatttattttcccataccacacagaggagtttaactcaacaaaactcattcgcactctagaatgggccatgttcttctctggagtttctgatttaaagagaggagactctggagggcagtacggagcctgaaagaagaatgcatggccaagggggagattccagcacttggagagcccctaaagaggagagcaggctgcagcctctgatgcattggcttaggggaccatccatcttccccctcccccacctctgcagtccccatcacccccaccctgcaggctgcctcctctgaggaagacgtatggctcctgctaccaggggcctgagcaatgtgttcacttccccagaccccatggcccacctcccccacacccgcatccctgcagcagccacttcctgctgccactccgctcactctcacccagccagaggcagaatggagctcagcaatctctgcattctacgctgtctgccactgggggaaagggggccctggggtgagctactcctataatagagtatttacattctgggtgaacacacacaaatgcaaggcaaagacgtgtatgattctaactgcaaaatgagacagaccattgccaagggctatgagagaggttggggttgaagtagtcagggaaggcttcctggaggaaggaaaacttagacactcctagaaagttacgtgggctctaaaggggtgaggcatgggggaaggcagcagaggaaaggatgatgttcttaggcttgggtttaccccatgggggtggagaagcaagaggaagtcagaaatttattatgtgggtggggaatcactgtgtcacatggagagaagacaactgcaggaattgttggaataccagcagggagtacttggaggagtgggaagagagagggaagaagatccaggtggaaataactagggaaacaagaatggccagaaaaggtcctgggaagatggcaggagggtcaaccttggctggacacacagagaagagcagagagagaggcacagacccatggggtctttttcccgcctgttactcagtcctgctgagccccaagggcccagcctcaagttgttcatggttgaggtaagaaaatgaggctcatccttgaggcaggccatgggcagaggccacatgcgaatccatagaaggtgagaccaaagtggctgaggtagatgctcagggcttcagcttggagtaagacctaagaagtgagtcttaaaggctgtgtagactccagccgggtactcgaagtgggaggacatttgcagaggaagaacatgtacatgatgagctgctctgtagctgcctctctctcacgtggcagcagaacatctgcttcaaaaggtaccaggaagactgtctttgcccacccagagcacgaaagacagagcctggatgggggaacagatgtgacctcagaacatcagtaaccctcttcccagggaagctggtggactttccctccctccctcttgcgatccactcccagagatgctactataacttctctgcagtggcctgcatgttttttaaatcttccaggtgattctcaggtgcagccgggggtgaggaccactaaggagtgatgctcccaggctgtgatttcaggcaccatggcaggtggatgagtggagatttggggcagaggggccttcagggagccccttcctcggcccctaggtctggctagtgggcctcctgctaccttcccattccccaccgcccagccttctcccacttcctccaggccggccaagtccaaggcctaaaggatctgatgttttattaaaatccagaccttcctattctagggccaccttcctctggctaattctgtaattcaattagtagcaaggcaagacccagctggggtgggaggagggagagcatcacatcgggaaccttcccttccgtgatgattacaccccaggcttcggccctgttcagagttgggcaggaaattgtacttccttcacttcacaatgacaagggccttttatcccggcacatgggggctttgtaaattactgccatctccgtgcaattaattctgctgcactgtgttttccccccacatgggagagggcaccgcccaccttcttggccacagcagtaccccttgcaccatggtctgcacgctgcccatgtcggagaggggcatccgccacccctgcgtgcaccctagcccgacagcaccctcccgctgcccacgctgcctgcctctccctggcccagtgctcacctctcctgccacacactccttctcccttccctcctcactctgccaacttttcccaatctcccttcagtgccccaatcttggatctctttcccccacccccatagtccctcttggtctccagcttgcagacccctgaatgaggagctgggccctccacttagccgtatagacatagaagagcccgtctccaccctcactgaattgaaagtctattcagagacgaggcatcaagctggtaaatggaagggattaagtaaataataatggtaagtgggagaaggtgacatggctgaataaggaaacatgtgtgccggccaaagtgttcagcgtatgtgatagaatctcaagtattagaggacaggcaggtctctgctggccagaggaggtgggcacggcgtccctctcaggtgaggagaggaggtgggcacggcgtcctctcgggtgaggagaggaggtgggcacggcgtccctctcaggtgaggagaggaggtgggcacggcatccctctcgggtgaggagaggaggtgggcatggggcccctctcgggtgagaagagggtgccatagggagcccaggtgtcagctgctgagggcagcactgtggtgtgacttctcaccctgcagttctgtcacctctctgcccccaccccaccttggatgatttccaaagctgtctctgctccagaacaggctgcgcttctatcctgcttgatcccgtaactcaggaagaggtgggacagaaagcgctgacccctaacgggtggtagactccattatgagctggtgccgggagaaccatcccagacagtggggcaggaaagggggcagctcagggtgaggtcctagaccacccagagagcccctggatcacttgggtggctctacctcatgtcccgtcagagtcgcacagctgggagggccctccaaaaatgggagggcaaagacggggaggtgtttgcaccatcatggtttccatcccccaaacaccaacccccagaactcagggccaaagaaccagaatcatttacatttccagcttgctgagttgagagcacctgtgtcaactcccagcaccgcagcagccagccccggctcagaggaagctttgaggcagggccacagccaccccaccaaggataatttccctcatgaagtatatttgccaggcggcagatgtgcaatgatctttgtctcctcaatacaggccatgggccctgcatcctgtcgggctcacctattctcacccacctccttttcatttcatcctactcttttagtaaagattttttttttcctttcaagttaattatgcaagtgatacatgaatacattctgggtctaaatgtgtcaaacaaaacaaaaaaagtgaaagtcataggaaacatacccccctactccccaccccgtactccctgttttcagtttggtgtgacttccagactttgtctttcacatgtaaatacaggtctgagtatataatgggcgagttgattgtgtctccattgtatatacatggcgtctattatttcacaacttgcttttcccatctgacaatgtggctttccatgctggtacattgagggtcttttcatctttttaactgcttttgagtattcacagtttaaaaatgaaagcattcctgtcctaagggacatttaggtggtttttaatttttttttgctattccaagcagccacactggatccttgccgactccactgtgagcacgagtgtatgtggatcataggatcaggacttgggagggatttctgggtctgaagatggggagagatttctgtgccactggccacatccccaggaaggatgaggcaccctccacagaccttctcaagcctcagcgttcagagcccggttctagcctctctcccacactgtcttgtgttgttaggcagctgctccttgagagaatcccgtttcccacctcaactgtgagttcccaaagggccccgccagggatgtctctggggacaactcagtacaacataggagagtgagtttggcagattagtggctgctgggctgaggctgatgctccccaccttcccccctttcagctggacaccctcacagcccacagccccctcctcaacccctgtgagatgtggaaatgagccacaggaagtcaaggccagctgttctagctgggggttctatgtgtcccacccccattccctccctaggagagagcagtgagtgtccaatggctgaggcttgggcaccctttcttccccggccccccattctccaccacaggcctctcaccatccacagcaccctgtgatggcaaattctcctcctgcagccccctccccacagtcaccatgcccccagggctctgccctcagccagggagcagactggtcccttcttttgaaccccggagtcagcgttaataactgcttatccgcatttgcctttctcaaagagccttaagatagccaactaatctgccatgctggcgtgtcagccgctgcatcggatgggctggagatggactgggaagggcccggggtgggactgccccagttagcctctatatccagccgctcccgcctcacagaggtgcagagggagagaaggaaggggcttcaacacctctctagcccctgcttcacaacagtgaactgatattgacactgcagtctgcacttagtgaagtctgtagaggctgttcatactcactggcaagtaggtctccccacaagcttctgagggccattactcttcccattttacagatgaggacgctggggtgggccctgcctgggaaggggctctcctgggcttctctcactgcttccttctttcatctccgttcctttcacaaatacattccctttccacctcctctctgaacccgaaaagggaagggaggcaggaggaatttctacattggaaggggaggaaaggggttttcactgggtgcaggctggatggtggaggagtcaggagctgcagttgtttatcagtcttttctgggatcaacttgggggtgaagggggaagcatggtgagagtgcactgtcaggttcaacaggctcctgggagctcttggggcaaaaaccctcccatcaggaacccacttatcaactctcaggcaacctctggccctgccaccactatagaagtccagtgtgcctcagtgcccacagatcttgaacagctctcaatagcctctgagcaccatttctgtgcctattggccccaccaaattagctgaggtgttctggcattcagtcctttcaaggaatacgtattagcctccacttatatgctggacactgagaaccaagcagaaacagaacaaaaccaggctcctaacctcatctgagcatggggagcctgcccctcaaagagcaaatatatgtgactctgtcagggagtgatgggtgccaaacagaaagggaaacaggaaaaggggtcagggtctgtgtgggtgcagggctatgctaaatggggtggtcaagggaagtgtctctgaggaggtctcatttgagcagaaaccagagtgaagggaaggagcacaccatgctgatagcagaggtggggtgggggtgccgttctgggaagaggaaagaccagtgcaaagaccctaagacagagtgcacctggggggctaagaagtagtgaggggaccagtgagtggggccaggggaagactggaaggagataaattcagggggtggagacggcagggggaggtcacccaaggtctggaggatcctgaaagattttggttcacaataaagttgtgagctctctcaaaaactgtggcagaaattcctggaagctggacaaaagcaacagattctttttcctctggaatccttttcttgttatcttgggccatggaaacaatatggtcatttcctcctcctactcctcctcctcttcctccctcccctcatcctcctcccctcaaacctgcccctgaccttgtcccaagctggcttgcctgcgtacagcagaggcagtggccacctcctggttgcaggcagaggacaaggccaacaaggggacgggaggaaagacgcccccgggagaagcaggcggcagcacgagggacgacgtcacgggggcctctgaccgctattcatttcagtccccgggtgtctccatcaataacagtctgccagtgaccaggagggaggaggacgggagagggaggaggagtgatctggggtctggaggaagggagacatgagacagagagggagagagatttctccgaagcttctccaagcctgaggcaggagttggaggtggggaaggcagagggggcactgggagctgagagtttctgtctcccaggcttttctccctgtttccttctttcatctccgttcctttcacaaatacattccctttccacctcctctctgaagccagaaagggaagggaggcaggaatttctacattggaaggggaggaaaggggttttcactgggtacaggctggttggtggaagagtcaggagctgcagaggacaccgggagcattctgtggccggcaaccagagtctaaagcaagcctggtgacaagggctgacataggtaccatactggcaccagcagcctgtgggcctcatgagaggagggcttgggccacgaggtctggcacagagcctggcacagagcgagcactcaggaaataaatggccatggcaatgaccaaatggctggctgtggagactggctggggatggactagaccagccaaggagggctgcctggagtaggtagaacttgatcagattcttgaaagatcaatgggtttcggagaagtgaacatggggaagaggggtataccaggtgaggaggtggtgagagcagaggaatgcgggggcagaagggaacacaggttgttggggatgtggccttggataagatcacgtgagagagagaggaacaagagaggcagccattccacagggtgccttctctggggccatgggtggcttgaaaaggtctgaggtgactgttcaccagaacattcaagcctgcttccgccatagtgagcttttgggctttccccatggttttgagccttgcaggcctcccaagccaccttcagccacatctgcaggcagagaaagaaggcctgacactgggcatgctggacagcttatgggaactcccagaaagactcccccatccccactctcttggccttgtcaccacacctaaaggacagcactgaaaagtcaccccttgagtatattcttctgtcaaatccggattccctggcgaggaggtggggtgtggcccagttagaattaatcagtgggagagctagactgagccttctcagttcgcaggtggggagactgaggccagaaagaggatgtgatttgttaaggtcacctagggaattaaaggcagagcaagggtggtctagtgctgtaagtcggtggcctggatatgccctagaagccctctgacttggaggggtgtgaagaccatctgtcactgcaaatcaaacaacaggggttgggacaggggacacagggtacgtttattttattaggagggcctggcttggggtcctccttacagactgagcctttatttgtaaggcttagaggagccctccaccatccctgagggagcagcgcccagcactcctaccggccagaaagacagcccatggtcaagtgtggctagaggtgctgggggtgaggggtggaagctgccccttctaggaagcgtaggggctggcgctgaaacagggcagagaggtctgaggcaccagggtacggggtaaggagagaaccgtaaggagaggggggtgtggtggggggaagatgcagggtggggagactccgcggagggagcaaaatagaaaagcaaagggaggtacgagaggcagacagccgggaacaccgagaggcagagaagctccgagaacagtgcacgggagagaaagagaggtggggacagggaccgagcggcagggaggggcgggagcctggagggcgggcggcagggcgcgtcggcgggcccgggggcgccccactgacccttcttggcgcttgctttcctccccaggctgcgccttcctcacctactgcgagcgtgagtcagcgctgaaggcccagagcgcgctgcacgagcagaagactctgcccggggtaagtggcgcccgccgtggcgcaagcggccgacgcgccgacagggggcgacttcgggaggccgggcggcggcgcggcgcgcggggagagggcggcagggcgcccgccgcccgcctgagctcgggagcccgcgcgcccccccaaatccctgggctctcggccgtccgggcccaacgggatccgggacaggggccccacttggccgtggccgtgaagttcctgcgcgggcagcctggggcgggggagcggcgcgtcccgggtccccggagcgggagctgcctccgccgggcccgcgggccgcgtgcgcgatcgagtccgcccatcgagtcgacgcgggccgctctagtgggggaggagggggccggcgtgggagggggcgccgcaagtgagatcaccgcggtttatttaaggagccagccctcgtctttgataaactatcgcgcctcggccctggtttatagcttctgtgcgggggagaagagaattatttatggcccccctaactgggtgtgatatcagccatggctattatcgaggctagttcatcaccataaaataagaagtattcttcgggtcaagggtctgcgcggtctctcctgtgggttcagagagatggggcggtggtgaggggggagagatatacggctgctgagtatctaaagataaatggaaagatgtgtgtttgtgggcataatttaaagattttctaaatatagtgttgacgcttatacaatggacactgcagggaagcacatgtgttctataagtatgcacacccatgcttacacatgcatgtttacattcttaccaagccaaccgtatgtaaacacacgtttccatttctaccccacagcgggaaaggttaaccaggtagacggagagaaaatgcaaccccgggcgggggcagccttcctttgcatcgaagatctttctttactcgtttaggggtggggagagctgaattacacagggccttccttccattaagacagcctttgtattgtattttggtatttgtgattgcaaagcacggggctgagtcatcttaataacatacccacagatgcaaatatatggaaatcgagcaccgcacagattttgtgtgaagcccagctctggcagggtggccattccccagttgttttttcagttgcgcggctacatgcacatatattatagtaattactttctgggtgccctctgtaagacggcagaaatatgcctcacatcgccccatgttatgtgtgaagcataaagccatattgtaggataatcaaaggcttctgagaaaggtttgtgctgattaataaagtgtttatggtactttgttttgggggagactgtgacagatattttagagccacccaaatggaatagaaaataccacattgttatgggaggcccttcatcagcttgagagagattgctagggagtttcatggtggctaaaagccggaatcagaaggggaaacagaaagagagaaggtgagagggggaggtttaggattttgaaaggggagaggctgggaattgggagtatttcagtagcaagtgtggattgttgaggatctaacattaacttgtggttgtttattttacatataatagaatagctaaatgatggagtgtattagttctttaataatttatagaaatactttgatgttgcagtaattacattaaaggtcacatatcaaaggtaatttggttgagcagctgtgatggtttctcagaagcaatcaatatcactgtccgtggtgctgatttcaccaaggggcctgccagattaaagaaggcttattaccaggcagaaaggcccaggggaaatcaggagcacattggagcgacgcgccagccccctttccacccataattaacactgttccccataatctgtgctaatccttcatactgggagatccagtggcatttttctgaaatcacaaagacaagttgagtaagtctgagggaaagggcaaaaagaaacgtgagtgtatgttgggacggggaggggggaagatagatagaggccaacagcagagctgaaacatagcctagagtcccctcgaacaccatcccttcttcaaaggcttcacagggaaactcatggcctcaaaaacctcatcaaacaattctcggggcaggcacgcccaccagagggaggggcaggaataaaagaccggattgcagctcgaagttccgagggcacattgtctccacacaaacctgcatgcagacaaatgaaacacaaaatgaccaagtaaaattattctttaaagtagagttgttttgattccagaaagcagacctggtgttattgctgttggttggttctctcctttgagatcagagaaagtgtgccactagcaaatgcagggacgggaccaagccaaatgctctcacccaaccaaataataggcgatcctgccagctgtggctgtgttcatggctgcctgtttcggtgagagacagagggggacttcttcttgtctggggtgaccacactaggtgccccagcaagcacactctatgtctgactaaagagaatgaaattgaaaaaaaagaacctggaaaactggtaacctcagcaatttaggcacttttccagacttcaaaatccattaaaatcaatccattaaaatcagccctccactttctcgctgaggagagaaagaggagaaaagatagtacaggcagtctatgctgtttctagtgagttatggagctcgcatcctgttgccagcaagaaaaataatcccattgctgtcatacacacacaccaccaccgtcactatgagcaacaataacaaaatgacagagacagaactagaggcacccctagcacatgtcttcattggaggcctgaaaagggaagctgacatttctcttgggatcagtggaagctcagaaaccagaccacagtggctgttcttacaaatcagtgatacgtgattcccagtatccctgggaaccagcctgagcagggccctctgatggctgatggagtcatccctggaccagtggcacaaatggattattatttttgagtttggcatgttttagtagaattagattattaaactatgaagcttcatctgggtctttttgagcactgccttctgccagaatccaggcagagtgactccctttttctaatctctctgcctctctcgccctcatactcttgatctcactctttcctgacttcctgttcttttcctgcccatgctcctctattcacaaaatttgtttcactattcacaggggacagtcaacatggggcagtttctcaatccatcaacaagtatttcctgtgtgccagacgttctgtaaaatacagagataagaaaaacacatccacctccccgcttggagttgaccaccaagttggggatggaagccacacacacacacaaatatctacatagtcaacaatacaagacagcacatgttactataaaatgggtagtgtggacaattgttcaataatcacagtatttttaagtgcttactatatgacaggcatgatgccaagcactttacctacattgcctcattttatcttcaaaactacgctatgaagaagatgtcatgattatccctcacagaggaggagatcgaggtttgcccaaggtcacaaaattgataagtggccgagccaggaccagcactgagtctgctaccaaagctcaggatacctgcctctgccagtgccaccggttgctttaggaatttagagagaaccaggatgaccatggagtgcaggagtgactcaaagttttcattcaggatatgggtagggtgggagtaaaatgagtcagatgggagcactggtccgagaaacggcccagagtcgaggcacacacaacaggccaggagccaggtgactcacacagggcaggagaggcccactctgagaaccacctggggcctgagtgtgcacaggaagcctcttgaaagaagtctgttccttaaaatctacccctgaagctttgtcgcagctcctccagccattgggactttgtggggaatcgtcttccaggaagagcccttctgtttccaaggttgggaatacagggtctcaagggagatgctcagatgagagaaaaccaggtgctatgacaagctgtggccagcacttttgctcctttggtagcagaaagggcttctcaccagggctggcaggggaagagctgggtccagccagtaggaggcaaggaagcagtgggaattagagctggtcagggatgggggtgggggaagtgggagctgtatctccttggtaaacattaaagttccaactcactagtcaaagattggcttttgtgtcctcattccaacaatcctagaatacaaagcaaactaacacactcctccctgctgtctcccccttcccctcccctcgcgtcagcctggcagacatgcagagtcccgccatcacgcctcctgactcaggtcaccgcgactcaggatgggtcacttccatggaaattcaatgtgaccttctttgagtttaccaggaaagatgttaaagtgggaaaattcttttcagagagctcaaatggatttctagcaccgctatctcagactgtctctcctttctatcccttcttctcacttttctctttcttaatcccatttcctcctcctttctttctttttctttttctttcttctctttgtgcccccattttctcctctcttctctccctctgcccattttcctctatctctctcaccaacactttcttcttttatccttcagacttgtctctcctttccctctcctccctccctctttcaactttggcccaccccacctcaaccctgacatccacaggaggctctggtggggcccccatcaccatacgggggcttccctggcaaggcccatctccctccctgacagtcctgccattgagggatccatctaattttatgtacaactgtaaagatgaatgataagtagaaaggatgaaggcaagaacaagatgaataaattataaagggcaaatgatgacaagacaggggtccccagagacagtgatatgataacagaaactaaagacgaatttatgatggatgtagttagcatgtatggaggctgttaattcttcggggtagttttacaatttctagtgatcggtgcaatcaaagcttttcattttagaaatgggatgtatttccacttgtttgtcctgtaggcacagtgttggtttttgtctctgaacagtgagtctgggtcccatcagcacctgcatcttccctcccagcccctgccaccttctgtttctctgcagagatcatctcagccagatccacacactcttccagttccccggtcctgttcttcctcttgctgagtgtattagcatgggactgctgcaacaaagcaccacaaattgggtggcttaaacaacggaaatgtattgtctcgcagttctggaggctggcagtcccaaatcaaggtgttggcagagttggttctttctgagggctgtgagggagaatcagttccaggcctctctcctcgcttctgggagcctcagacattcctcagttgtagatggcgttccctctgtgtctttgcatcatctttccaatgtacattgtctgtgtccagacttctcctttttatgaagacagcagtcatatcgcgttagggcctgccctaatgacctcgtcttaacttgatcatctgcaaagaccctatttcaaagaaggtcactttcatgggtcctggggttaggacttcagcatcttgtgaggggaacacaattcaactcataacactgagaaaggggctgccctgtggctcttccacagtagggaggataaaggcctacaatagtgtctgagtcatgggggtcgcccagcctttcctctgtatctcacctggattcatgcttttttctttctctttgggagaatggatgatatatctttcttctttctcatattccctgaaaagaagtactcatctgtccttttagggcagtggctctcaattttgccctgcgggggacatttgacattggagatgctactggcatctaatgggtagaggccagggctgccgctaaatatcctacaatgtacaggacagtcccacagcaaaacatcatctggccccaagtgtcaacaatgccaaggtagagaaaccccatcccgggcctagggtgggtagaaggtgggacagtgaggccctggggcagagcgttcctcccttacttgctggttctcattcattcagggaacaagcccaaaggtccttagagtgttacaagagggatgacttgtgaagaggcaaaagctccaatggtgtgagcaccgggtaggtggggagtacgggcaggagcagagggcagagtccacctccgggcattaaggatcatttgtcgcctgccgttcacatgcacccacgtctgcagggcagacttgacccaagggcttagcagtttcagcaccgactccagctcaactctctcctgggttaggtgaatggagactttgctataacagagctgggaccagaacccaggccttgagacccactcatgtggggcatttctccagcccataccttcagaagagcccccatcccaacagcaaacctgcttggcaggcatgtgccctagccaggctttccagccaaacaggaccttcaccacagaacaccagcctgggctcattatacagaagggaacaccaaggttccaagagagaagcccaaagcactttaaatccaggtactgagggacagatgggtataggggctacatctgtgatgccttcgaaacttgcctctgctcttccacgttatcccttagcccagccccctgtcccactgtgttcatgcaaaatcttttcaatctcctccccacagagacatctcaaagtcctccttctccctggggctgtgcccacagtcttccctcctagacggcccactttctccttccctgccccaaccactgtcctgagggttccacatttttcaagcaagtgactcttgactctcataggggcctcatcttctcagtggcccccacgacatagtccaggcctgccatgggctgtgcccagaaaggctccctaacaagttgatctgaaagaaccagagaacctctgtgcctgcagtcatcatacatgacttgaaggaaataaacaaacaagagggcacatgagataataagcagagggaacctgggccaggtccagcctgccaccaacaagccacgtggtctgggcagagcaatgagcccggaccctccctggacacaccatctagactgtgaaggaggcggtgggccagatcgcctctcaagacccttccagctttctttatatttctaagaataatgagctcagcattactcacattacttaagacaacagggagaggagaggagagggggagagcaaggacgacagtgtctcctgctctccactacccgacgccattggtgacaagtataataaagcgtgggtcagatatgtctctccctgacgcagagcagccagactgcctgctccccagggctggggctggattcctgatggtacccccacccctgccctctgctcaggtctcattctaaggacaccagacaggcattttgcaattttcacactgccccaatgtggcttggatcacggctgccatcacccaagtcagcggcagcagcgtttacagatagcctgccccctgcgaagtttggttgtgggagggagggtgtctggcatcggacaaaaataagtaagacacggcctgttgcagaaggagtttataatctggtttgggaggcaagtgtgaagacagctcatgatccagaaaatatctttaggggccccaaaaatggtagtgaagggaagtgcccaggagttcagatgagagagatggcaggataagccaacatgccctgcaggagcccacaccaccacagtggccttctgcttccaggccctcacccctctgatgcattcttcagaggctggccaagggtgtcattgtaaaataaaggtcccaccacctgcaaaccacccaggcttctgtcacccacaagattcagccagggcagacaccatcctggccacaaaccctccagatgcacgtagccttcctgcaagctcctctttttccatgtcattccctctgcctggagagtttccattcatccttggaggcccaaagtcaacatcacttcctctgaacaaattctctgccccgctcggggagctttccaatccgtccccatccaagcacccagcactgcccttggggcccaggctgctccattaactccagagttcccatcttggattcccagcctgtacctgctttcctctttctgcgcctgtgcctggaactgacccagagcaaggatgggcgggagggaggcagctccccatctgctgagcgaccttgctggccttggcatttccagaggcaccaacagatcattctggcatctcctattccagccatatcacctctatgcccctccagaaagtcttcagcctagctcaccctgcgggggtgcatttggaaagaggagaaagcttcgctctctggtcatggatgtagaaaggaagtgctgtgtggaaggtgctttggcccaggcattcgccgccggtgcaggtgtgaatgtgggcatgtgtggagcgaggtgtgtgtccaccggagcgagaatgtgaggctgccacaagggctgtgcctgcatgaatccgtgtgaggctgcaaagggtttgttgacctttcgccagaaaacgaggctgagaaacagaatgtctgtgtgagctcctgctccgggatggatgtgttttaggattggagggtttctgctgggcgcatgtgtgtgggcgagcagaaggacacgtctttgttgttgacctgcagggatccggaactgtgggctgccacatgccatcaaaaatgggcaagcctgggtgataatagaaaaaaatggcattgttctttattctttaattcctcatgaaaacggctgttgtaaagaggaaagggctggagtgcaggggagataaggtctctctagggcgccgtagtttactgtggttcaagcacccttttttttaatcaaaggcatttgtggtatgttcccatgagcccaccagggggcgccatgtgggtggcatccccttctggtggctgaaggagcacagtgtgtttaatggtgagcctggtgtgcccaaccctgtgcccagcacagaagaggcaaaatgatgccgaacactcggctccacccttcagaacactgtcagcctgtgcagaggacaccaaccaacttggggcatccacccaacctttccaggtctgagttccctaatttctatcatgaaaatcacatgtgtgcgccctttatatgctgtggattgctagaaatcatccaagttgtattattaatgacaaaacaatgatgcgagtggggatgaccttcggagtcctttgccacaataaagtcctgtgactcctaattcacagatgaaataattaagaggataataaaaatatagaatggctcaagtatgcagtttggaccatatgtcccattatatttcagaagagagctgggatgccccgaaaggactccatggagtggggaggacagaagttggttgtgtatgtaaagggagaggaactcgagaaatgagtaagaggaggaaggcttggggagccaggtcagtgtgaattttcctcctggaattgggagtgagaacagggaaaatgtgtctggagatggaggaggcttttctcacactgctgtgcttcagagcctctagccccttacagcctgtaggctccaatcaactccatgcagatcagttgctctgaaatcctgcaggtgctgggcatggcttcaggccccagcaagtctccagcttccccgctccctagaaaggacctgcctcctcccagcctacccaccagaatcctcccagggcatcaggacctagccccaagctcccttcctctgtgatgctcctctaggttgctctaaccaacactgatctcgcccttgcctgagcctctgcaggtcaacagcaccggaagtctaagccctggctaaaatgtggacatcagatcagcatcactggggtctgttagaaatgcagagtcttgagcttactctagatcatctgagccatgtcactcaaacagcagccaccaccctttaacaagatccctaggagattcgtgggcacaagaagttcaaccaccactggcctaatgttaggctttaaaggatattgtcttagttggagcgcccccagaagcagactgtagacaagcatttgagtgcaaatagcttctttgtggggttgaccccaggaacttgggtcaatagtggagacaaggaagagaggaaatcaataaggggtgtcttatcaggcagaccagcttccactgcgggtgttgctgaaccccactgggactctagagccaatgtcaatcatactccttggagtcatcccacccaaggggccagagaactggggtattcatgcaccaatttccaccaggctgtggccgaggttgtgcccaggggtcttccgctttctagcttttctggcttgctgcatgcgtgggcaaagtgggctccacagtcaaaggaagccctcgagctggaagtgctggtgctggcagttggaagtcaacccactgtcactgaggtggggaagagaaggggtcatgggcaggacaccacctacatctactgcagattgagccttgtggcatcatcccaaataagagagcagatcaaagaatcttgtctctctaactccgatgacagctaccaatcactgtgtactcgctacagccagacacttcacaaatattatctcatttatttaagacagcatcacccaggtcttaaccaggccttattagtgctattgtatggaagaggaaactgaggcaaaggggcttgctcagaccagaaaaccatggagagatctggcgccagagcccatgctccttcctcctcatcctagggcactaaccctgtggaaagccagagctgcatgagggcaggaaccgtccccgtcaccccaaggccacacaccaggttcttctggcaggagactctggcatgattgctagacacccagggggccctgtggggcagggcagtggccctcgaggtgtcaccacacacctggcctacctctgcattggagaagtcctgttctgaatggaaggcagagtctgattccatccccagctctgcctggagccttactgtgtgcccttgggaagccatttaacctctctgaattgtaatttctaagtggccacccttccacttagaaattcatttggctgcagtggcctcaacaaataacactttgggttttttgcacatcacagagtctggggcctcgtgttgcttcagcaacataaccatgcaacagcaacaacgtaacagagtccttctcactgctgtcggagggcattgcatctgtcatcaagcagagcaggtccagctgcctctgtcccttctatcgggaatgcaaaaggtttccaagaggtcccctctccaggagacatctaagtatgtctcattggccagagctatgtcacagggccaccctagctgcaaggaagtctgggaaagaggatatcttgccaaagactatgcacatgtcttccatgaacaaatctgtgcttcttcagtgaaggagaagggccggataatattggtgggacctggaagagtctaccctcacacagcctggtggagatggtcaggggttacagaagagcaagctggctggagcagcagccaccccccacacacgtgccgcatttgccttcagcttagatcacaccctgatgcttccatgaggatgctgagtcaagaaagcagtcttagggtgtggacaagaggagcttcttcatgcagcactgctaactctgcatgtttattccagctactgacatggtttccaattctgtgagattcataagggggaagggaataaaatttcagctacccttaggtagcatatttgcgtcctctgtgtctttctcgagtttgtgcccttctgtgcctttgtgtgtggcttaaatattgaagaatcaaaggctgccacgccagcagacagctgtgccacatcacaggcattccacaggcaattcctcactcccacttttttgacagttgcaccagtggtctcacaccctctgaaagtgggtcggccggctttcagggccagcagcaatggcaccaactttattttcagagactgaagcaggacctcttttgtaaaggggtgtggggtgaggtaggggtgctctgtgcaaagcctgctcggattgaccttcctggtaaacttcagcatggctgagagccaggaaggaggggaccagggatagcacgggctggcctgtgctgccctctactcctgaggccctccctcatagcctctgccagtggcctgggctgtcccacaaggtagtgagcctctggtcacagacatgttcaagcaggctgagtcgcagggttcgggggttgatgcaggtaattccaacattggaccaaatcagttctggggggcgagttaagatcccatgattttatcttaagttttactagcttaaccatcataaatgcccgcatagaaccagtcccagtcctcagccccagccagtttggctaggtcccaaattccctagcctctagcctggagtaatcctcatttctccttcaggcctcccaatttctcccttctctgaagaccttcaggccttagaggcgaaaccctccatgccgctgggcaggctcatgccttaaatttaacaacctagcctccaatcccagctccaccactctgagctgtgtgaccttgggctaatcacttaacttctctgtgcctcagttttctcatctcagccctggggtgccagtagttctttcatccaggagcagtttatggatagcatgaagcatgcaaagctccaaacaccctgctgctcttgcacacaggaaatgtgcacaatgacagtttctctacagctgccactcttgcttcagtgattctgtctccaagaaaggagtgaatcttcctacctggccccttctgatccatccccggcccctggctgcccaggtctggagggcagccaacgcaggatgcgtagcagcaaacctcccagctttatagcctagtgcagggctggccgcagggaggggccaacaaaccctaccacgctgaatggaaaccactgtgagagtggcaggcaggtccataaggacgctggagctggccctgccaaggcctggctgtgctggaagaggagggctcaagatcaccaccttcatgcccccacaagaggtgtttgttaagtttgtcttcatggtttgcacaatcccccacatgaggcctacatcatacctccttctccactccctgttcaccattcttcactccaaaacacagcagcacccctggaatctgggtgagcacaacccagaagattgaaaaccctaaccagggagagcaggagcagagtcatgccctggacaccctcatggattaagatggtccaggaggcccttcaaggccgagagacagagggtctgaaatgaatatgcattcagcctctcccagcagccctgacagctggcatccagcagctggaacggctcagagcctgggagaaggtttgtaattcaattcagtaagtgtttcctgagcacccaccaggagcatagccccgcgctaggtgctgcttggcaggtggaagtgagtagagggcaagaaccctgctgcccctggggcttccctcctgcggaggagagaagatgtacatgccaagcaattagaggacaatggatcgagactccagactgcaatttagagctgggagtggtttgggagcgcttccaggcaggactgctcactgagtgtcacactgcctgggcaagatcggcaggatctaggtggatggagggggctccagatgtcactccagtgaggtgacagcaggggcaaaggcaaggaggagggagaggacagggggcgctggctggagttcaggaagggcttggggacgggacttagcatgagttgggaaggcctttcacatcccactgaggagcttgttccctttcctttgggttcttgggagctcatgaagcttcctgagtaggagagtgtccacctccacatggtacatagcatggtctggatggtgaaggcctgtgccagtcctgatgagaggactgaggtgaggaagtgacatcaggaacaggagctgaggccagtggagagcctgcctcagtccccctttccaggagcagcctcaatgggcacaggctggcaggagctactcacttggtttcgggcaagtcctgctggtggagggctgaagggaaacttggctccctctctgccctgaagctggtgagggcattgccctgaccacttgaacacttgttgcacctgaatgagaaagtctccattcagggcaggctacgcagtgctggagaggtttccaaaccacctcatctcactaccacacgtagggatttctttgacattcagatttataataaatgtaaagaaagaggctccacctctctctctctctctctctctctctctctgtcacacacacacacacacacacacacacacacacacacacacacacacacacagagtcatgaagagtcaggatctgcctgggatccatgtgttgcaaatgctccctgggtgatttcactgctcctccagcttcagaaaccctgtgtgctcctctattctttgtccagcattgtcagaaaatactgattcctcctcttgggctagaagagtttgatccatgaggagggccccactctgcaattatgtttccctcctgagggtcagagaacctcagaaaagtggagtgggaagggacataagcatcacttgcctagacagttggacacagcgctgctgggatgccacatttgggtctgttctcatttgcaacatggcctttatcttgaaaaggctccatgattgatgaccaagtaaacctaccctaattcagaagacctggggaggacacccatttccattagcatccatattatggggtgtgctcagtgaagttttattacttttgagtagacaacccaacagtgcttccaagttaatgtccaacactgctttaatgaacagatgcaaagcctgtgtaactagcacagtgatgaagtgacacagaggattcgtaagccacttgcaaacactggtcttaggttgacaacatattcctgcacatagaacttcgtctacactgcttatttgccaatcaaaatttttgatagatttttcaaaggccaactttacacctaaagtccaaattaccctctattctgactcggtagcattgaaatctacaaagacttcagcgaactccttaagtattcagtatctaacagatgcaatgaacttctggtggccaaggcacagagggtcatagttcttgcagaaagcctttcctgatgggcttgaaccctcattctctggccatcccccagggattcactgggggctgtcctgcgttatgaagtggcgaggtgggctacctcccactgatgccccttagtactctcagaccccatggagctttgctgttggtttgcgtgctccagcctgcaccgtgcctggatgttcctcaaactcttctaactcctgttaagtcagtgggcaagaacctgatccatcactgatagataaatcaatggaagaaaacccgctatctggccactgtttgagccctccctcactcctgcccagaggttctgagaagacagtatgtgccatcttcttctattcttattaaacgatttatctgggggaacttaatattttcttttaggataaactgagctaatgcgatgtgcttgttttaatttgcaaggttaactgatctaattatctgtggcgtttagttaaatccttgtgcctgggccggctgcaggtgtgggctttgaatcctgccaacaggaaatctcttaaaacgaactgatctaactcagcgggtctgctggtatgagggattttctaataatgcatgaatttattaacagccaaagataaatagaggatgtatttacattaaacaaattcacatggaactgtctgctgcttccccggccccctcccagcagatgcatcccccaactccacatcactgtctgtgccatacaggaggagcagagaatgactctgaggagccccatgcagctacaagtagatgcccctgccgtcatgacacgaaggggtaagcaagtcaggcaagggttaaagattagattttagttggccccagactccaaaggagccaatggtgttgccctgctccctaaaagttgacacagtcttgcagttaacaggtacctccctctaaagaaggaaagtgatgatcccactttccctaggctgggaagatggccccaggaaatctgagtctggaactgagtgctacacttttagagaagtatgtccagagaaggtggccaggacaggtgatatggtttggctctgtgtccccacccaaatctcatctcaaattataatacccataatccccacgtgtcaagagtgggacctagtaggagatgattggatcatggatgtggtttcccccatgctgttctcgtgatagtgagtgagttctcacaagatctgatggttttacaaggggctcttcctcctttgctcattcgctctctctcccctgctgccatgtaagatgtacctttgcctctgcttgcctgccaccatgattgtaagtttcctgaggcctccccagccatgcagaactgtaagtcaattaaacctcttttcttgataaattacccagtctcaggtatgtctttatagcagtgtgagaatggactaacacaacaggagaaggaaatccttcctcctgaagctagttgaatgactgatgtcatccatcttccagaaaacagccttggcagatataggtgtggccagcttgaggtggcaggaggagaatcttgggaggcaggtagaggggactcaccccacacagatgtcctgagagcctcctggcttcccaacccctgccctgccatggccctgacccactagtagctgccccaaccttcttctggagctccagaaaccctcacagaggctaggcctctgaggccagcactgttcaatgggagtggaattattactccagaaatgcactttgcttgaaataccgttgagctgcattgtttgaaacacagcttcaggatcaggccaagcaaccaaagacgcatttgaaatgcatttcccattttctaaggcccaggccccctgacagcccgagtcacttagtactgacctgttttcaactagcatggagctctccctcttccacatgaacgatcctggataaaattgtacttgcaaaggcccatgtagaatatgcacacacgtgcaagatgtacttgcgcacatacagatgcagctgcacactcatcactcaaacacacacacatgcacgcacatacacacaacagagtacatgccatataggtgcacacaaaagtatgtgtacataacaggtgatgtgaacatataacacacatgggagaggcacatgacatcctacacatgtccacatgtgggcacacgaacacacaggtacacacactttctcagactcctttggaattgaaagagaatgtagctctttagggacagctgaagataaactcttgatttctgatttccagagcagtttggacaaggtcctctgaaatgcattaaaatgctaatcacagcatctgtctgaactctggcagctgtgtgacttgggggaaatggaaacagaatggattctgaaggctgggactcctctttgactctccttcccttgctctctcctttttctctccactgccctcctctgcctgctcccctgtgggctccacccaataccatcctctgtgccacctcatcctcagcctggtccacgtggccattgactctgcccgactttcccaagtgcgtggctcccattgctaacaagtaaagccaccgcccttcttctggcggtgtccaaaactccctgctgtggagttgccccagcccatgtgcaggatggtcaaggccgagttccagacatggcctgcatcccagaaatggcctcttgccctctgggatctctgttctccccaggtgagagcagagaaagtgcctgctaacaagttacctgtcctgtaacaaggacagatggtagaagtactctatttaacctaaaaggagggcactctgatgtggaatgtcaggcagtgtactaggcagggcagggagaatgttttaaccagagtagctttctgataccccataatgacccgtatagtgacaagggatgggatcaggtgggggtctgagactcacactcctgaatacccttcactgactcagtcactcatcttgtgatcattagctcctccccaatccccaccgcctcccactctgacctcaggatctgggacgacactggcttctgactcccccacccgtgagcatgtggctccacacccgctgagtggctccactagtttcctttgcctggcatcctcctatgtccgccccaagctccttccagcaggtcagtccttggccagcattccaaactcagctcacatgccaccttctccagggagccttccccaatctggataaggctggataagatgccctctcctgcatgcctagaatttcctatgcctacctcagtttaccagagtttaacatgactgctccaccctagactgtgctctctttgagggcagggactgggtcctacttattcatgtggacccagcattggcacaaggctgacctcctaagttctcagtagctgtgaggctattgaaatgctgtgggtggctgcatgggtacatgaacccttgggaccagacccactttgtgggagtccctaagcagacatcctggaagttgtctgccctttctgctgggacctagaatgggctctggtcaggcttgtataagtacagacctcacaccaggtttcatgcgcccacatccccacccccaccccatgaagatcgaagctcccagcataccacagttccatttttccttttaggcatcaaactgtcacttcactaaacaccatctggagactcctggcctcagcccctcacttctcccaaactcttattaatgtgatgggtgtttattccttcttcctcctcttccacttccttcggaacatctcagctctgtggcctgcagacattcatcttatcttcagggagctcagctccgctggggagggctgctgtctcgcgcttggctttaggcagctgacagtgatcaagagcagacagaaagagcaggcgcgacttagctggccccttgtggagcctcatcccagctggcctagaaagggggatggcagaggcgagctgaagaaggaacccggttaaatgtggtccacagtggcctttgactctgccagcactccaggaccctccatggctccctggtgctatcaaacaaagcccagattcctaaccccagcttctgggctcccatgattctgctgccagcatactgagctctcttttccttcctgtgcccatgttgtggctctcatctgaatgcatcccctgccccaattcttgcttgtccttgaaggaggtgttcatgtcttcctcctccatgcagcctttcttgactaccccatgcataccaattcccttccattacacttactgcataaccacattatttttgctcagtgctccaatccacattgcactctgttttatattatgaattttatctccctgaacctacacagactcctctgatggtacccacagagccatcccagctctgggcacacagtgggcccacagtcaacccccactgtcttcaagcaaagcagacctgcagcagtgaccccactgagacaaacctcagctctctgagggttgcccagtggcctttgaggtgctggtacacagagccctcccccagtgtccacatggaggctgcccattcccatcttccaccataacccggctggcactcagggccagctttcttcccctggaagagcattaagctaatgcgtgttgtgtctcattagtgacattctgtttgtgccagggccaggcaatctgatgggtggttgattggatattctgtttatttatggcaggaaaagcattctttattgaggactgggcagcacatttctgtccccatggcactaagatcctctggaaatcaagcaattgtaaattaagactaaataaataatatataataagcaataaagattgcaggcctccatgcaaagagctttcctaaggcatctccccaacctgaagacactggccgtcccagagcctggaggaaggttgacaggaattgccctctttaattgataggtgaggaaactaagtaaggcctgtggaggttaagagactttcccggaagcaggataatggtgatccagcacatggcagcatcctgaggagtcaggagacccaaggagactcctcacagacctgtccatttgctgagattgcacacaaggaagtagttatcccgggagaacatctgagaacatcagcgtggactttcttcctctgtctcctttcgggcagcattgccagtgtgggtgggccaaactggctgagtttagaagtctgaagatagcactgtggcccttgctccctgtgaaccagccagggcaggctaaaatttgggcttctccactccccatctgtgagatgcctcccctggcagggctgctccatgacccacagagtgccaggggctccgagattcaaaggctgtgattctcagccagcctgtctgagaaacacacctccacacccaaaacagcaggccagccagggcacccaagcccaccccaggcagagtcctgagtcatgggacagaaatggacaaagctctgatgtctcccctgagggctcacatatggtccaagtgtcccaccatgcagccccagccaggggcctagaaagggctgcctgagtcattctgcagccagaacagtgggaggggagaggctaggcatcgatgggagtctttaagagccctgagctggaggcatcagaaaggcctcccagatagaaaggcagtgtgtggagcttggctgtacagatgcgatctacatttcactcagcccagacccctctccagccaaccttcctgccttccttcactccttttctgctcttcttcttcatccttgcaaaaactaattgtctctctcaccagcccgagccccgtgctttccagaggtttatgcatgaaactaattatgcaccgctaatttagaagctagcagctttcccgttaccgttcatttgatttggggtgttctgctgtgtggcatttctgtaaatacgccacaaggctgggggcctttcagggagggcagcctgagttcggggtcaggaggaggggcctgggagtctgcgggtggcaggtgtggtatacttcatgagggagaggggacaggagggcgccattaccataaaccaaggaaggcctcattagcagccctggatggccctgccaggaggtaggaatatgactgtaaaatgtcacactcagttgggtggggacagattagaaaacacccacaaaggtaagaaaaaaaacctccaggttgacaggagtgtttagagggcctggacgccgcaggccaggagctgggacccactgagcaaggttggggctggagaggagcagtgacaataagagtggtcattgccctggaaaactccctccaaagaaagatctcaggcccaactgggtgaaggcactgcagtcctggagggctggcatcgtagggtccaggagggaacaggggcaggcaggaccctttggcccaggtccaaagacttctgtttccacttccaattatagcttcctttgtgaccctaggaagacagtttaatctctctaggccttgagatacacttctggaaattgggaagaatcatttcaaagttgatcacggggtttggtagggaccccatgaaatgagagatcttaaagagttttttgtgaattacctgacacagtccacaaatatgtcgggtgcctctgagggcccagcaagggctctggggagttgcctgggctcttggttctctgacctgctgcagccaggcctggtgcagccatgcccgctgccatggacatgtgaggctcagtcacacaaagctctgaactctcaggagggcccctcacttgggttaatgctctgcagtcatcatcttgaaattcttaatcatttttgaactagggccgccacatttccaatttgcatctacaaatcacatcagaccctgtcctcatggagaaggttctctagggacttctgtgcattcattgtgtcttctggaaaaggagctccctgaggacaagagctgtgtcttctcctgtgttcccccagagtgcaggtccacagagtgctcaacagagaactcaggcatttcaaatggctcttacacatggtacaccttgcattatctaaaacaagggtgcccaatcttttggcttccctgggccacattggaagaagaataattgtcttgggccacacctaaaatacactaacactaatgatagctgatgagccaaaagaaaaaaatcgcaaaaaaaaaaaaacctcataatgttttaagaaagtttgcaaatttgtgctgggccaggggttggacaagtttgaataagtcaaatcttgtctatctatcatgcacactgcccttttacttcccttcatggccctagcaagcatcttccaacaaccctactcccctctcccagcaaacatgagggccccagctctcacttcaacatagaagagtagatgtcagcacctactgcaacagcgactcatggatgctgacaaccccactgttgactccaatctctggtggctaggagcctgcctagctggcagctcagagatctcagggtgcatccaccagggaaggattgggagaaaaatcggacaatgcctgcagggcctgtggacagacagccagacagaaaggcctccggaggagcagacacaagggtgaggagaggagatgtggcaccaggagtcaccaatgggaagcccagcttgctgcctaaagggaagctggacaaactgctctctggaggctactgaatacccccaggagaccgtgatgctagcttctccttttccctgctcgagacctccaggcaatgccagagaggcctttctgggtcaggggtgggcaaatggatacaggggcaacccccagatcatcctcctacctctgctgagctctcagggtgctccagggagtcagcagggctcacggtggggtgaagcttatcacctactctcctctgctctgccacccatttgctgtagaccaagtatcaattactgtctctgtgccacatttccctcatgggtaagataaacttggtcctcccaggagctctttcaacagtaccactatgaccctcccattttcccccaatcatgccttgtccttctcagcatcctcaccaacagtcagacatacgcagcttctaattccaatccaaccagagcacccatgtggccttgtagctagtctcctacctgcactggcctctacctccatatctgcaaaatgagcatgacaatacggtcctttgcagggctgccaagacgagggggaaatggcagccactcactgagcagaagctactgctgggactcggtgaccactgaccattctggcgtacagccacattgcttagcaggacagctctggctgcctgagatgccttgcctcctttcaccagcactaaaatccactccatctgatatggttaggctttgtgtccccacccaaatctcatctcgaattgtagttcccattatccccacccgttgtgggagggacctggtgggaggtaatttaatcatgggggcggttcccctcatgctgttcttgtgatagtgaatgagttctcacaagatctgatggttttataaggggcttttccctcttctgctcagcacttcttgctgctgacatttgaagaacgagtttgcttccccttccaccatgattataagtttcctgaggcctccccagccatgctgaactgccagtcaattaaacctctttcctttataaattacccagtcttaggtatgtctttattagcagcatgagcacagattaacacggcactcttgacagcaaatctcaagccctgcctccaccctggggcttgataactcccataggactcaatggggaatcagcctccacacctgtggtgaactagttgcttctgtggggtggctcctgtcttagataccttctcccaagcctctcataccgcaggcatgcaatagacagcagggaagagctgttgagtgaaatggacacactgtgtgaataacactcttggccacccacactagcatgtgatgtattgtatggcattccttgtctttgatgctggtttttccttcccttgatggaatctcagtgtcattttccagcaggttttttcctttcccatagcaaaccttaagagacccacctcccacatccaatcaacccacagctgttacttggtgttgatgccaagtttccaagactgccagagaggcaggcctcatgctgagccacagtgaccagacttctgtgggaaccagtgttgagtaatggttcaaatggtaaccagcattagcaaatagttcctgtgataattgcagcctaatttgtgtgtgtgcacatgaattcgcatgcatctgtatgccattagcactctgaattatctcctgagcagcagtgcttaccttggggccctgtggacaaagccaacagtgagacatatctagagctcagtttcttctaagaacaaaggacaggaatagcaagatttcaaggagaggaaagagtttgcttgcagaccattctgtgttccacaagctgaacttctggccattccatagcacagaagcagagaaagtcaggaaaatccagacctcatcactgttagtagttgggctgcacgatgtcctcagctgcaacctcctggaaaagaaacaagggtaattcaggaacccctcgctcagcataagagctgtgttcctggttggactacagagaggaccgtgttccattttaaatgtgtccagggagttatttgaataactccttatataaagtgggtgatcatctctggacttgagttttcatatcacagacttcctaagtacagaaacttttagggttaagatctctacacagacccactcatgttcagacatggcgagccctggggccatggtgattcttaggaaacttcccaaagaagcaccagtgatattgggtctattccttcgacttcctcccccttggccaatactgcccatccattcagaatttgaactgctaggtttttgtaacaagtacctgggaattgctatttgattttccttttggttttctgaaaagtctttcaatatgataaactgcacatcatgccattcaaactctgccttccaaggacgtatgtatttagaagaaagcatcttcacacacacacaaaaaacaagttggtgtgttgttaggggctgagtgtccaaagtctatgaggatagattggggtgttccagtaatggccaacgacaaccttgcacaacaaatgccaagacctccacccgctccccactgagtgtgagcacagccaacccaaggcaaaagctgcaagacagagctgctgaagatcggcatgcatccctccagactctgaggccaaggtcacatggcccacaggctcatgtgtgacaggagtttgggtcacacgtgagcttcatggagttgagctcatgtgtgacccaaactgctgtccagtcctcattcctcccacttccagcacatcacatccatgaatcctgtggatgactgtggttatgaaaatgtgaggactccatgctaagaagagagtgagtagatggaaggacataagatcctactgagacagaggtgaagagaattcaggtaactgactggaagttcaagagctctgagcaaaagagatgagagagttacctacacagaccattaactctgggagagagagaacacagagcattttggctttagagagatgactgagtctaagcatggagccagtgtcatggggacaaactgggaccaaagagaatgatgtggagcatgaactcagcagctcaatccaaaaacctatgagcgcaagaaaacactttaaaaccctgtggtatggccccacatccttgaaaattcaccacaaggcaggtagtccaggcataggaggtagaatcagaaagtgtcccagggctctgtcatcagcgatgagcccggaaagcaatgtcagactcacaagtagcagcaagttctctgaccaaggcaagctttgcaagaaatgaaggctctgcaagcagagccaagctctccagatagcaacaagctttgtggatactgatgagctcagcctgcaagcttagcgtctacaaaagacaatagattctacaaagagtaactggttctaaaaccagcgaagaactctgcaagcaaggagtaactctgcaaacaacaggctccacaaactgctatgggttctgcaaaccttaatgagctttgtaagcagtatcaggctctgcaaaccccgagaaactttataagtggcagcaagctttgcagatagtgatgagctctgcatgtgatgcccggttctgcaaacaacagactctacaaacagcacaggctctaaagccagtgacgagcccttcaagaaacagctggctctgcaaacagcaataggctctacaaatgtcagccggcagggatgagctctacaagttataacagagatactgcaaactgtaacaaggtctcctatgtgttggtccccaaaaatagcaggttgaagaacctcattccatgccaggaggtgaaatacctggccatgcagtactccttccacataagcccaaaggtgataatggagccctctcttcagcaacatttgaatggaaggccagtccccaccatggggaaatctccactagtggtacatccttactagggcaaagaaaactcccagaggcaagagttctagtgtgcacctggaaaactcaggggtggtgctagggatggcagtggaagtggccaaagcagatactcacatctgcagagaaaaagcagagccctaatgggaaaaagagctccagagacaggacagcctcagccaccagcacagaatgctgccacccccacttcatgaccttagccgtcccgggaaagggctccttgctcaaaatatcctgctgtctggcctgtctttgatgctcgaagtcccatcattaaaacttatactgttagagttcacgcatgacccttattggaacgaaatcaccacccacccacccactctgccaacaccctcagcctgacacctcggtgtgaatcagctcgtcacatcctctccctggtgatagacatccaggagcagcatttgaaggtgtgtgggagccagattgtgctggatccttggagcatcggatattatgctagaaaggactggaggaggagtgggcagggatagaggacagggaaacaacttgggggtcaggcttgaaaatggaagggtcacatttcacagtcctgccaggccacagcctcctgggaaagctgggctcagaggatggaacaggccagtgggcaccagtgagtgggagaaaggaaaggaggaggaagtggagatggtcttcgggctgcgggatgtaaggtcttctcccaggctgagctcccagaccctgtcaatagcaggaagccttgctcagttaattaatgaggtattcaggctgacccttgatctctggagcaactcaagggctttgtgtggctcctattaagtccctggatttgttcagcagctgcctgggaagtgggttggtggaagactcctttcccctcctctctccaagttctgcacactcccagatgcccagcggcactcttagccctggatcttggggtgtaagggtcccagaaagagctgactctgtgtctggagggggctttcaggaggactgggatattttcagggagaccactctgaggaggaggaagccctgctagattcagccatggcctagctggcagcgaggggccacgatcagccgctggtgtctcctgaagacagctccagtcaggctctggaggcaacaaaggccacagggagccagggccttgtcccaagaggagaaccagagacactcagaggccctcctgctctttaggaggcaccccggcttctgcaagcacccagtgatagaagcagccacctcctacttccactgaaccttccagatgggggcaggtctcagaagcctcctcaggaaagacatcaccagggagggagcttctgggaggcccagtgacagaaagcctgggagaggaagatcaggctgtcccatccaaagatgaggaagggagtggagaagtggaatgaaggctgaatctctaaacatgcaggcctggggctggaggagttcccgaggtgtggtctcaggaaatgcctctggcctggtaaagatgatcactagactggcagcccagagaatggcatgtggatctttgcctctcacctgggcatggctacagtgcatcaggaataggccccagattgagcatccgcaggagggtacaggcctggctctgttattcatggctgtgtatcacctgatcacctgggcctcagtttccccagctataaatgggggctaagaagacccatcctaatttcgacccaaaggaattcagtcagaagatggcagcagaagccttttgggaaagatgtggccctgcagataagggagtcatgttcatcatggatctgagtggccctgagccctttgacagagtcccctttgggactacacgctgtcagacgtgcagggctggacggagcaggacaaggcaggttgttaacccaggtcctgcacacagagaagcaaagcctcactcctcaatccatatagggcaggcagagtcctgggcctgcagaagcaggcttgtcctttcagggtctcaacaagccagcactacgggccaccccaccgaggccacttccagagtccttaccaagccccacaatggagggttcttttaaggcacagaggtggaaacaaggcctcagaagcaaaaggccagaccagggtgtctgccctggagaaggaggaaaaggcccagggataacttgatggggagaaaccaggggcagctgtgcagccaaagaggaaggtgccagcactgaagcaggaccgaggctctggggttccctctgccacaggtgaccaagggtaggtatgacactccagaggcctcaggaggagaacagaagccacggggcccagattcagcaacaagaagtcactcagtgcatttcatgctgctagagatgggagagtgaatgaagagtgagcccagccctcagggaccttcccgtctgggggtgcagacaggctccaaaggaaggaggttgcgagattctaggatggaggctcctctggccctcagtggcatcagggtgaggagacctctctacagagccctgggagagcccgggggcccaaacctcggcctgtcccagctgcgggtatatgatcagtcattctctgtggcaagatttcctgcagtgacccagcttgtagaccttgtctatgacctaaaagcgtgtgtcctgcagatctgctgcagggatctgccatccacctccatcatccttccctgactgcccatgctcacattctgtgtccacagccctgatgtcacagggctggggcagaggcactctgggctcagccctgtcagccctggctccccaattatgggcctggaaagagaggggcttctcattggggagccccaaaccacattccttcctgccccctacagcccaggccttggctgtgctatcccacaagggtacagtgacacccttggtgggaagtggacatgagttggaagaagaggagagaagggagaagaggtagaataataaaaagcagaggaggtctcactcacaagaaccctctgagcaaattaagcctgaagacaaaggaagaaagaattaactttggcccaaatattggatgctctgcacttggtatggttcatcctttagaaggtgtgagcagataggcctgagaaattctctacttcccatccgctcctcccacctctcaatgcattaaatccttaaaacaaaatgaaggcgctgctgttttaaggaaataaaaggctctcgtatccaaaagcccagaggttttgagtggagagggagagaaatacatttgaatgtggattttttttcccctaaagtgccacttagcaatgcacagcctgggcatccctgagggagaaggctctcactagggagatgggatgggactttggccacggcagagctgactctagggatagggacccatgtcctcgtgctggagacacgtcacagagaggaaagggctgtaagttaactgatggctgctctcctcattaggggccgtagcacatccagggctggttcctgtgcctggtacagtgaaaacaatgtgtttagttgactctttaattcccaaggttaatcatgttatttttaaaaaatatattttattgtgttaacaaccgccagtggagatagttaattaaacaaagtgtgatgttgggagtaaaatatgctttgcaggcggactctttttcctgatgccggatggacatttccatattgatgggtggtcataatacagccatcacatatcagcatggttgtcctgaataccttgcttattgcgggggtgtgaacaaagctgtgggtgaacacagggaaaattaagctacattcctgccttcaaggtgctcacaacagataaggtcacaagatgcatgacaagaaccatgtgggggctacctgtaaaggaggtcagcaaagggttggctgtcccccacccaagcaagagagggtcactggaggagcctaaaggtctgacttgggtcatttgaatgcggcaaacttcactgggctcccaggcctccttcatagaacagagcccacctgcctcctggcatggaacacaggagatgctcagagttgagatgcatcctctcgtacctcccagcccctttcaggcaacgagaaactactgcccacctgttgggatgcaaagggatatgatttgcttttctgcttcccagtgcacaaatctttgcaaagctgtttttagttattttttaacctgaattataacttcctttttccaaatatgataggtctgtctggaggcaaggcaataggggttttttgctagaaagacagatgagtggagaggaatgctggctcattggagaaggcagctcagtccaaatccaggcaaaacccaaggtcagcctgaagaacaagacttgggttagatcaaacaggacgggggtggagggagcggggagaaggaagaagaaaaccagctgctgcctgtggggagttcatgagtcctgctggaaaaataagcttctttattttaccttatgtattattaggtgccagggtggtacagaggctcatatcggcattttctcttcagactacccctgttcccaggctgctggccatccagtgactgcagtctgcatttgaggccctgatgggtcatctgcaccctgccctcagcctgaattccaccccaggcaggccagcctcctcaccattgacccccgatgctctgtgccgagtcccacctccttgccattgctcctgaggttccctccacctgaaatgacctctctccatggaaatctttcccagttcaagggtcggctttttctgtaacccccttctcttaaatcccatagcccttaaagtcaggacagcagcctccagccccagtgaaggtttgtggcagggaccagttcccccaagagtgtcacacggtcagtactcataatcccctccttgggagctttgaagaaatgtgaccctgagagttactggggctggttagagaatgttcaagaaaattagcattgggctaaaggttagggagtaccccacaaacacaagctgtttttcctgaactgccttatcatattcattcatccattcagcaaatggcaagaacacacacataatgtggtcagttttgtaaaaagagggcggtgcctttgcaggccaggaagaggtttcccagaagtatgagcaaatatgttggaccataaaaggaatggtattgctacaggcagagaaaaggagggggccattccaggtagagggaacccggaagcaaggcagaggccagatgtagaagcatattcaggaagttgaggcaggtgtgtgaggggcagctgggggtggtgcctcatctggagggtctggaatggctggcaaagccaggcaacatttttctgcgggctggaggagacttttgcatggagcagtgaggtaccagccctgagtttcaactcccttggggtgtgagggttaagaaggggtgggggcagtgggtacttggctcaggctatgctgggatctcagccagagatgtggctatgcagaggcgaaggagatgaattctggaaccatttgggggttgagaaaagggagaagtcagagtgatgaattaagataagaagcactcatatttcacacctttacttatttacaaatatgtatggaaagcctactaaccagggtctgtaagagaaagaggatgattccttgagcagtgtccagcagacctggggacatggtggggtggtgctctgatgcagagacaccgtgacacagactctcaagcagaaatcctttcccagagagttctgcttccaaaacaatgcatgaggtgacattttagcccctcaagcctatgtccctaccccaggcaggaggtgctggcgtctgacagcccagggaaagagaaactgcttgccagggcctggggtaggacagccacaggcctctgggtccaccttggggttccttgagcttgaccaccaagagctgagttgcctggctgggcaggcaccgcctgtttccccatctgtgcagaaatgacagtcctggcctcaagggttgtgagaagacaccacggtgtgttagagttctgcagttctactcacagcacctggcatgtggcagccacttaataagcagtagctgttattactcctgctgctattattgccattattacattaccaagcgtggctcagggtggcgtgcattcagccgacaccattgctggcagagatgagtaccagagatgctccattctggaaaatcttgccccacatcccactgtccctgcctcctggctgatgggtaggcagcacatgccagcccagagaaggggcccgtggaggcagggagccttgcccaggtgctgggcagaggagggctcagatcccaagaatggaggggtgggcagaaagtgctgggatcccccgccctgggctcatctctaggtttgctggtggaggagggaattaagcaggcccatcagatccaggatatgagaagcccactccattccaggccccactggatggatggctggggttgggctgctcagaggatggagtgggtgatgtgagggaacagcaccagcagcggggcttcttgggccgctcagcgctgtcccacgtcatgtctgatggctcttcagggtgtgctgactgggtgctaagtacgactgccctcccggagacccctgtcaggagccactgagctgtgaacacgcgctagctactgtgtggcccagctcggatgccagcagagggtcctgtggagggaagtgcaaggcagggatgtggaccaaaccacagacacacacacacatacatacacacatgtgcatgtgcacacatgcgtgcacaaacatgcagtgacacacatgcacatgggtacatacctgcatacacatacatactgcacatgcacatgcacacacacaaaagacacatgcatacacaaccacatgcacagagacacatgcacacatacagcatacacacacgcacagatacacacagacacacagaagcacacacgtatacacagacacactacgttcgtactcacagacacacacagcccacaccacactgtccacctcccttatcaggctcacattcctggcccacaatgggcctgtccccattgggatttcctcagtgtccccctcctcctcccaagggagccaccactctgtcccctactctgcccatgtcctctgcagtgggacggggggcagctgatcctgctggttgtcccattgcagagcctggtctctgcagcccttccctctaccagggccaccaccatctccatgtccctggggctccttcagatagaaactgcaacatgtgggctgctttgcattgacaaaggcgcccacagccacactcagggcagtgggtggggctttggcaggtccacaagtgaagtgatgaggcccagagcacagccttctgagccaggtcccctccttcccactcctgaaaaaccaggccaaggctagtgacagaggaatgtgttgtcccttgctaggagcctgtgcattgttatgctggacccaggaacgtcccaaggagtgacaggtaccaccgaggccctgcaggcaaagagatgggctgtgcaccatgggggaggggaaggcatctggggagcccatgaggtgaggcgggtgccccgtagggtcagcgaggctctgctgcccggaggccccagcgggaagatagggagggcaacattccagccatggagatcatcagggatcgccatggcaacgggggtgcaattaaggcctgtttcagctgggagcagctgtgcgcactttatctgccttgaataaggagcaagggaaaaaacctggggagggaaagggggcggggagacagagggaaatggcagtcctttgcaggcctcttcctgttctgagagaaagaagggggtgcaggggagagggagggagggaggagagagacaccgagagagacctggacagggagacagagacacaggtgcagagatcgacagagagagacgtatagcacaaagagagggcgagagagaacgcgtttttttccagccacaatgggaccgctcagcctgcttcttcctcccaacactcacacgcatacacacatacataacacacatacataacacacatacgaaaatatacccacatgtactcccatacaaacttgtaccttcccacacacacatataaatacacacacacaccctctagcctctgagccttccctgctcccttcccctccccacgcctggaattttcttcccccaccctggcccctccatagcataggcttgcacttctgggctctgggaaaaccctgtgtccctcaactcctgaagttgggttttctccttgttagtgcagggacttcagcacccactgctctcactgcctgtcctgggctcatggcgtcctgggtgtggaagagtgaaaggtgggcagggggtggtagccagagccaagggcctccagctaaataagggacacaccttgaggttacaaattcttgtctggttcccacatgccccagggcctttgcatgtgctctgcctatgcctggaaagctctgctctcagatgctcacttggctcactctctcacttccttccagtttcttttcaaatgtcaccttatcagagaggccttccctggccattttatctaaagtagctcttccttccccttactctgctttactgtttctgtgaccgtccaaccagttacgccctgacttgcatgttcattgttggtccccctccactagaccgtgtgcttcaggagcagggaatttgtttaccgctgtatccccggatctggaacagggcctgtcactcagtggcatagggcttctcaaagaaccctgcaagcttaaatgagtgggtggtagaacttctcccacctccctagaatcccatagccagcctggaagcagagttgagatcaagctcccagcactgtcatgcccctttccctgggctgcacgcttcttcctttccctgtcccccatgatcccgctgtcccagtcacactggcccagtaactctcagtcaaaggcaacccatgcttccccatcccttaggatgacatccttcctcttgcctcaggacccaaatcgttctaaagcattcagatgcctcctcctccttgcagccctccctgatctccaatcctgaagccatctctttcctatgaacacctaggctactgagctggggcaaccagctgtgggttggtggtccggttttgctactggcaagctgtgactcagcaagtcatttcatctccctggcattgtttcttggccaaaaaggcaaaggagcgtgatgctgtcactaagggtttcctgcttggacaaacccattgggggagctcatgaggcttgggccatgctggcatcaaacagtcagctggctctgtgtctgcgcctggccagtggctgtggcgtgtgggcccagagggtgggcaggatagcatctgctgggccatgccatgggagggtgagtagacacattctgaagagcaaggtcccagtaccaaacggaactttcatctccaaggaaccaggcagtgggctgagcacttcttgggaagcgcagagtctggagatggggcactcgaggctgccagacccatgcaggcagtggggtggccacatctattcctggcagtgcccttgaaggcggtcagagcagctcacggcagttcccgccagcctcccagatgccaggacgctgtcaggggccagcacctgcgcaagacggaaagggtggggatggctgccactccccatccccagccagtcagcaaatgcgtcagagctggacatgccctgccgtggcactgaggtcacagccgggaggggacagcatagggccataccgtgtgaaggcaaggcctcgccagggggctcagctgtcagtggggctgcagtcagggaggcttctgtgcagccgtgggctggaggcacacctcagaggactggtgactggtagggaagggaaggacttcctctgtcctctgccagcacccagggccctggccccgtcctcctcagagaactcattcctggagaactgcccgggcttcaggctccagtcatcatgcacaagcctcaaggcctcagtgacaagagacccactccctccagtttgaaccgggaagcaaattcctgctgatgtcagcaccactgagcatccaaaagttacctgtaatgactatgcgatgctctgcacaactggccattcgactgcctcatggctctagatcattttaatttgggaatcactgaatgccaccgtgtactcagacctaggcttataccaatgtggctctgaggagagatacgtctcatttgtgtcagcaggatggaagcaagggagctgcagggagccctggatggccccggaggagaggtggaggtgcttgggggatggtcacccagtggtgctggccatctggctgttagggttctccactggctcatgtggaatgaatgaacaaagatgggaagaggcactgaataagtgaatgaatctcccacaaaaagacaggcagtcaataaaaactcaggaacattggcccaaacccgaacaccagggcaggtaagaatcagaaaataaagtcatgccccagatgggtagagggtgcagacacccacccctcaacccagggcccatgtggcatcacagctgacctgcaaagagggctctgagccctccagcagccaaggatgtgctgggtgggccagggcccctggggagctcctggaggctggggagcgagcctgcacagagaaagaaaaacgggtcgctccctccagctgcaggagaggaaggcccagttcgggtcaatggggattggaaggggtggtaaaggagcacggggtgcaagtgaggccccgactctgacagtgagcactggggaactgtgggaagtcaccatccttccctgtgcagtgtctgtagtgacacctgaagcccttcccagggctatggggaggatgcaacaagataatgcactcaagccgcttcacaaaccagcatgtgagggtgagtcttgtaatcaagagggagcctctctgtgacgtgctctggatcacatgaatttggatgccaagtgtttggtgattggcttctgggctccagagcccttggcccgttggctgcacaggcacccactgtggcatttcattggcctcacaataatgagaccctgccctttatcggattattttttttttcttttcttattccacttttagcgactatggcaggattttattgcatctcctcatttctgcaactgatcacacactgctggatagtcaaggaaggatattttaatggtgaatgaatgagtgagtgaatgagtgaaatcactcctatacttgccaaggatctcctatttggcagaagctccttgagggaaaaagaaaggccagtgtgtcttgtgcaaattacagggctttgcacacagaaaatgaccagtaatgtggtactgacttaattgtgctgcccagcaacaccatggtcttctcgtgagtggctcctgacacctgatagactctctgaaaacaggcttgacagtgagggatgaggggagaggagagagggagctcaggagaagggagaggtagagagaggaggaagggtgggaaccaaagaataaatgattatttgaatgattaaagaaatattagctaatatttactgcatgcttgctgtgtgccagaaactgtgtccagtgcattacatggactctcatttaaccctacacactgggggctgggaccatcttccaggtggtgaagctgtcacaaagagaccagggactttaatcaagggtatacagctcatgagtggtagagccaggactcaaatatgaacctgtggaaactacagtccaagcctttcctgccctccctcacacagggagcccaacagcacccccagttgaggaccctggggggctgcattggtcacccaggcctggctcgacccctccaggctggggctgtgtcactggcctggagagcccctggcctacaatacaaggtccttgatctccaaatccatccgtctcttgcacatgggtaatgagggttcaaaagtgtggcatggctgtagcatttatgcagtctgcagaccctcctcatcacatgcacaatccacctggacacagccccaccacccacgttagtccgctcctgctaaggcaaagcatccatgtctgtgaccttctctggagcagcaaccgcaagcatgaggggaggatggcgctaacaaagcctgggtcaaagtccgggctctcgccactctgagcctccttctcattctctgtaaggtggagatattaatacctgccttgaagggttgtgaagaggataaaagctgggtccacgtggggcctggcatagcgtagatactcaaagggtagatgataaggaggaggaggatggtggtggtgggagacagagaaagagacctgcgggcacacaggcgacatgaggcttccaggcctcccgtggccatttccctgtctgccttctctgcctcttctcctcttcagcttctcaggggaagctctatgggagacacggaatgcatcggacttatgcctccctttctcttttggaaagagttgccttctttccaactgtcccgtccctctgcccctccctgggcctctgcctccctgcatctgccaccccatccttgcgggcattgtcttcatgcctgcctctctctccctgctcccccctcctctgcttaatcatcttaatcattgtgtccttgtaactcagccccaggctgtctggcggcagcactaccccacgaggtgacaactctgagtcacacacacatttggatgccagcactgtgactaccgaccccagaccccagctgcaggccccagacacccctcagggactcagcagcagaccccaaacccaactcagggactcagcctaccgaaacaccgagaaacccttccaggctccatttctgctcccctgggggagaatagagaaacaagaccctggccgcgctctctggggcaggatgtccagcaaagggctcagactggcccctctgctcccgcttctgcagcccagggtctctgaagtgtggtggggaggggaggatgtaggatcctagtctctcgccagcctttctcagcctgtcctcagcaccaggccacctaaatcagccagaactagaggtgctggttaaaaggtaggttcctgggtcctgccctcaggctatgtctttaaaaagtgcaccaaagttacagttacatgccccctcctcctttccgagcagccccacccagcctctgtctgcacctgaagctggcaggctgtgtgtgcccttctgcaggccgcaagcccaggagcccgcgtcacgcacacaggatgttccaacagcaccctctcctggaaactccctttattttctgagagtcaactcaagttcttttggtgaccatacctagtgtctctcagaatcttactccgggagggaggtacggggaggcagaagggaatggggagcctcgtctggagggcccctcctgagcctgtcggggccatggacagtgcagagaaacaccccatacccaggaactagcccacccctgcacctccccacctccctccttcctcctctgaaactgcatcgttcgcgtgtgtgtgtgtgtgtgtgtgtgtgtgtgtgtgtatgcatgctagagagagagagagagagcatgtttctcttggagaagggcagctttgtttattacggctgtaaccttggcttttgggtagagcagggcagtgggaatctttggagcctggagcaaagaatttaatattcataagtgacctcaccataaatggagtccagcacccccgaaggactcacagatgatgcccgctgcctcctcccacggttgcctctctcagggagttcgtcaaagcgtccagacacagctcctgcccggctgcctacagtgtctccagacctatctcgggctctggactcctgagctgcagtccaggacggggatgctaggggggatccacccctacccacacagggggtctatacaggtgcctggataccaaatgcagggtaagcaccctggggtcaagagaatgggctcagggtcagggtctcacacatagtaggaacttgggacatcagtatagtaggttctgatcgagcattttgcatatgttaactcatttaatcagcacagcaaccccaattacagatgagaacattgaggcagggagaagttagtaactggccccaggtcacacagccagtacgtagcagtgctgagattcaaggccaaggattatagagcgtgaggagaatctcacagatacacgtcaggcccatattcagttgcagaaacctctaaatttttagcatctattttagagcttgacactcagaatatgcacactgaatatttgttgaattgacatctcgctgggcagagtgagcagtaaatatctggcgaatggagggcggatgaattatgcgcaaaagggattgagcttgtgaacacagaaggaggctcaggattccatgtcagtgaccacccccagccccgacacagagagggagagggagagggagccgaggaatcagggtctgctccccaccctttcataccaatgaagatgtgggcagggaagcctggaccctcttcctgaggccttccaggggagccttggagccactctccagccattcagggatgaaagcctccacccacactgatgatgtcattgtcctgctttgagaaacgctggctgaagcccctctgccaaaacacttcggcacatgcacacacttcggtggtggggagctctctcaaaccttgcagcaggccatgggcctcctctcctgccagcccagggcctttatgcagagggagtgtgctagaatcagtatggggtagcacagggcagatggtgcagttgggagaccctccccccactcccctgtttatctaacccagagcctgcctcttgtgtttatttttaacaagcagaatgatggtccaggtcttttctacttttccacttttataagcaaaggaaggagaagaaataagtctcaggaggcggagggacagagacaggctagggcgttgccccctgtgaggctctagggtttagctctaatccacagaagacacgtccccttcccaatcccatccccactcccgtcaggttctcaccctccaggagctcccatttgggaagacaaaagctacgcactggaaacaagttgccccttgtttggccacacgtgcagaagtcaggggaggcttagggatgggtagaattttgaaagcaaaaggtagtgggaagtaagggtgcagacaagactaggaagataggtgcaaactaacccagaaggcagtgtggttggtagcaggtactgtgtaagaaaaggaaggagagcttaacaggacggagagggggagattatggagccctgtccagatgttccttagagaattctacaattgcaaggcgcctccgtaagacgtcttgttcattcccatacaggtggctcagggttccacagcccttcttgcagactgtgctaccagcggccgagcctcttcttagcaactgtccagagacgaggcacagcacaatctgtttccttgtattggaaatgtgcccggtggactgaaagcaaccttcccgggagtcgccatgtggacttcccatgggctcgctgtgctgtttgggccaagcccccttcagcagtagcatgcactgtgatgaccctcaccccagccaccttcccttcctcagctattgacagccatcccttctccctttctagagggtatcttggcccacccagccattaatttgcaaatgggccatttctgcttcaaagggaaaaaaattttttttctgagatctagtttttaagtattctcaaatgactagtgagaatcaatctgagatctaagagtttggtgcgtattgagtgtggattctcaacttccatctttatttctttatgtcacgacttggcaagcaggtggatgaatgtgggcctggaggcatgggtccctacagaagccatgttcgtcatttttttaatttgttccttccattgagctgctgctgctgatttttatccctttcttctcctcctccattcaccctcccaaagcccctgggtaattcatcctttgtccacaagtctggccaggcccagctttgtgccagcaggagccagtggggcacccaataaaggaaatgccccaggtaaagggtgacacaccgtgtcatctagggtctttgcggtttgggtgacgcactgtgtcatctaggttctttgcggtttgggtgacccacggtgtcatctagggtctttgcggttttggtgacgcaccgtgtcatctagggtctttgcagttcaggtgtggagattcaggggagttctgaggagggggaatgggtgtgagttgcagtcgtcaggaggacttcctgagggaggaggactgcactgggccttcaagaatagaatgctccccaggccacaagcctagtggtgagtggggaggcaagctggctgccactcctgaaaccctgggtggataggtgtccccttctgtttaatatgcaccttccccaaaagagggtgatcttgcaagatagagggtgaccacaaagcagatggtctgactcaagataatagtccctggctgccacctcgtccccatgggggctggactaggctgccgcagccaaaccaccctgactctttctacccctcctacctaattgccccattactgtaaataatatcttcccatccgaacaattagcctcctcattttgaaactcctggtttgttttttctggttctgaggccttaacattggaaaatacaaacatatccggcatctgtctgccgtctcccagcaaccatcccagccactaatgcacttacagcccccacaggcctgctccccagttcccatctcccccgtgtgtgtacacacacacacacacacacacacacacacacacacacagcattgttgagttctgggaggtagggaggagccagctccctggcatctggaaagcagacagggagctggctggctggagcttccttcaggatctgccccaccctccgtggctgggagatctttaaaaacaaatcccaagccttccttcagtggatgtccagagtcactggtccagcggggagagacagtctgaaaatgatctcaaggcaagaacggtctaggtatcagcagcggcagatacggttgtggtggtagtaacgttgacaacaaaaataatgcatccactatctaatattcacattccttgcaccactttacggatcatctttaagtccatccaatcctttaaacaagctcaggagatcaggggagaattgttatctccatttgcaacagggaaaccaaggcccagagggtctgtagtttgtccaaggtccttggaggataagcaggggaatggctagttagacagatgggtagttaggtaggtagataggtggatgagtaggtgattgcaaggggtaaataggttgacagaaagactagatgactgcagccaatatcctcgctctcccctccaggccactcattgcaataatcacctgccccacaggatacagttagttgtattttaaattgaaccggtgccatttattaattattccctgtgggccccacctcctccaaggaaggagacaccacttctcctctgtgcctcccttccctcctgtggctgtatttttggagctgaagctgaggacatctggtctgacatggaggaaatgctcctcagatggtagaagaagtgaaatcagggctgccctgggacagcgggctgagcctggatgcttcacactgggcctgagacaaactgggcacccagccatggccagcaaggcctggtggggctgaatgggagcaaggacgtgcctgcccttcctcctcagttctctaggatgtcctcggagctccaggaggagagcgcagcccagcctcccctcctccccacctggttgttagttccagcacgttccccctcaccgaggccccccagccaaggctgcctgaaaaactccaccgggagcgtgtacaggacaccttgggtctaatgtaacatttaatggccaaatctccccaggtccctgcattaatacaaaactgctttactcattctaaccagacagagtcacatggctaatggctccaaggctgagcctgggcaagagggaggtgatgaaggaagcaggagccatcagcaccttgctgtggccttgagtggcagaggtgggccatccccaggaccagaagtcattgtgtgacctctgaggacaggaccctgtagtgttcatgtctacctcctaggagcctaaggcagggctgtactacacatcagtcatcatttaatacacatataaatgtcttggggacaaatgtttccccaaagaaatgcaagacaggcatacactagcccctgcccaccctaagccagagatgatatgatgctgtccagccacacaaactgagccctgcctcccacaccggcctgaggggactcaattggttcctacctgggagctccagggatatggggggacaggagagctggtgggggagagcttcccagagaagagtgactaggccaagttgtggaggtccccaagggctccaacatggtcctagcccccaaggtccttggagtggtcaggaagacaagacttcttaggagaagaaggcacacagtgtcagaggaaataaggtcatttggacactgatagcagggctgtggatgtccaggggtgtggcacaaccctcatgagctcctcagtatttcagacgcacacatgcacacacacacatgcatgcatgcatacatgcacacacatgatcagaaaaaagccctccagaaattgacctaatttggttgtactttcaatttatgtaaaccccactttcatggacactgagggacaagagaaactgtcccatggccatccaagtacttccagattgtatccatgcctcccaaacccaccgcctgcccctctcagggtaaagcagagctaccctcactccagtactaactgcagccaggcctgcctctggccagctgcaaaacctagtgagagtccctttgcttctctgggcctcagttttctcatctgtaaaatgaaggggcgggcctggagagtccctggggccctctgcagttccagcatcaggactgaggaggctgctgggctctcaggtggaggcaatttcccagatcactgagccccacctggccaccattgtgtgaggcctcccctgggcattagccatctggaaatattgccatccatctttctgaatatctggttaaaacacttacctaatcctaacctaatcctttcaatttggggagagaattgaagaaaaaaaaatgcaagcagcctgaagcctgaatgctaacagatgggtaaaaagtatgtataaattacacccgcggctgtcaattcaagctctctagataaagtgatatgaaaggtgtttcatttataggggaaattaattgccagctgtatgactggatggtgtgaagaaaccacagccacacgatgtgtcccgtatattttttctggctggattcagtaccttctgtgccaacggctcctgcaccactccagacctggaaggcaccagggtaaacatgaccctgaaccactattccaaagttaggatgcagccagggaagcttcaaacatggtagggtgcacgacattgagaggtagggtgccagcccctcctgctaccaaccctgggtctcagtgtcctcatctgtcaggacagctgcttaaactgtatctactctatctactctgtcagcatcctgggcacaggatcacatcccagtcttctacataccttcatcctgccttgccaagccccttgccccaccatggatactcggtccatttcaaggggtaacactgacatctggaacaccagtcacatcatttagtctggaaccaacccactcttcactgacagtcaatcacttgacctttcaggcttcagtctccacatcagcatagtgaggttgtcttaggcaacttgggctgccataccaaaaaccacagactgaggggcatacaaacaagacaattatttctcacagttctgggggctgggaagtccaaaatcaaggtgctagcagattcagtgtctggtgagggctcttttctgggcttgcagacagccgccttcttgctatgtcctttcatgttggagggagactgagctctggtctctttctattctgttaaggacactaactaatctcatcatgagggcctcaccttcctgacctcatctacacctaattaatctcccaaaggccccacctcccaatacaggtttcaacataagaatttgggtggcagggggacacaaacgtcaagtccttaacagaggcacttagctggaaggtccacagctcccagtgctgatgtgtattctgactgttaaagttctcattatctctgtctctggctgtggagatcaggaggctgagaagacaactctactgggaaatagaggcagccaggacaactcctctgcccacctgcctggatgtgtcctcgccagagatcctttatggggaagaagtgtgcatcacaggaagagacggcagccactctaatgccttaccttggtcctccaggacacaagatgggtgggagtggggaagcagagtgctggccaagccaagaccatttatgcccccattcccccagtttccatagtatctcccccacaaccaaccccaccaaaagtgctctctggatcgtttggtgaagatatctatatccccagaaccatttctgagaagggaagactgcaatgctgaaaggcttcccggctctcagagtgcagggcccctgacactaggaccttggcaccagtgtgcttgcccatcctcacccagtccccatcaaccaggaggaggggtctcccagcagcctccagcttgggaaattgcttctggttcctgcttctcctgccttctcattcttctttctttcttgggcatggggtggggcaggcagagctcaaggtggggcctgcattgagagtcaatttggaggtacacacttgtagccacctgccacccactggggagcctggcccccagctatgctgcatgcagccactctgccagctgcctgacaagcccctggggtctttccattctggctggggagggggtgagtgagaggatttctatcctgtgctccccccattatcagaactattaagacaatgagctaatattctactcagatttaaataataaattaatctgcattatattgaggaggcctgagagagacttaattatctggtgtacttttgggtggaaatgaaggttgggaattgtgctgggaatagacaagctccctgtgatcacactgatgtgggagtttagattctggggctcctgggcagaggtacagaagtgccccgacttccctctagccccagccattccctccaacatggggagaaggcgcctctatttctgaccatcccttcaaagggctgcaggaacagtttctgaattgtgtgttctcctgagcaggcagcctaggaagtgaagaaccaaagcctctgtatagcctgagctgcttgccagggaagtgctggggccacctgtccccctaagcaaacaggaataacagaaactcccccagagggcagaggtcagccctggctcttgatcccccctctgcagcttcttgctgtgtgaccctaggcagcctgcttgatttaccccagcctcagtttccacatctgtgtaatgaatatgataccagctctgtccagggtctctagaggataagacactgcaaggcgaggagcttttagcacagcaccccgggcaggaagccctcaggaaatggtaaccggtgtgcctgcagatgctgtctgaatgagggagcatttgagggcatctcgaactgctcccgagttcgtggttaccgtcttaaacaaacgtatcggtatacagtgctggagagttgagccacgctcttctcttaagcgagccagcgccaggcctgtggttaatttttctccctggctggttcctgccgctccctgggaacggagcttttcacaccctgagccagcctgcccgagaaaggactattttcagcccagcagctacagcaacaaaaatgtgaagtcattcctgctgcctccagctcacccctccctagagaggtgagcagagaggtgcgggccctgcagcgggggtcctggagtgcccaccacctgctccaatctgtaaccctagggagacaccactctgtcctgggtttattcctcatatccactagttcacctcttctcctccctataggctctctcaaggtctggggtcttgccaggctctgcctggggatgtggcatcctacggggctctgaccctctctggaagacacgctagggtgggctacagtgctgaggactggggtgtcaactgaggctgaactgacagggtgcagcctcccctgctgagagtcgcctgggagccagtgccttgttgggacgtgatgaggtgggggcaggaagaaggcacctgagtgatgaatcattgcagagaatccagggaagtgggtgttgctgagatcctgagctgagaagagcttgatcatttgttaagttcaaaacctggcagttgtctcagtctgctctgcaaagaaaactggggatcagagaccctaagcaagagagagaaactcagtggtcaagagagctgaagcctgaagagaggtgctaggagccaaaaggggcagccccaccccagacccagactagaaccattgacagcagggcagcaacatgtcagacacacccaagacacacgtgcacacacacacatgtgcacatggacaccagacaggctggggaatgggctgcaggctggtcacaggtcagccaaacaagccctgggcctcctgcaagatatgtaatctttgtggcttctagatgctcacagagaaagtagaactggaaaaattccacctgtctcagctgagctaaaaaacggggtttgttcacagtcaggtcagagtagtgagtcctaggaagtgggatgtggcaaggatcacctttccctgggttctctacccccaaaggggaacccagggaagcccagacaggggctggaagagaacagttactagagtgggcaggtgacctccctacatcccctggatccccccctcctgtggacttgccatttttctcccccaagagttttggagggggtagtcaaaagatctgaatttccccctgcaatagggaagacaagatgcccattttccctgctcagggcttcaactgggaaaaggagggggtgcaggaggaaggtgtttgagggtgtacttaggagcaacatcgcaaatcaaacactgggaggacttggggagttggcgaggagaccagattctcctccctactccctacactgaaagggccgtgggacaggcaggctgccctaggtatttactgatcgcatctgtggcctcctgacatcaacagagtggctgctgtaaggccaatccccatgcaacccgaaaggccctggttcctggtgcagctgctcattcaccccaccagggaggggtggcacagcaaacccccggctctcttccatctcctcgctgctcttcgctggtgtaataaggtggctgcacctcactcccagaggaggttgggcaggggaaatgatggcacagccccctgttttagacaggggccactgaagcgcttttgccccatgaaggtgactggtaccagcccctgaccaacaagccgcagaattagctctgggcttccggtccttggaagtcaaatttcagtggtcacaacagcagttaatagaccaaaaatgccagaaaccagcctccggggctttccatgagcccagcagcctgaggtgggtgctttctcctcagagtaacccaaaccctcattgtctgtactcctcattgggcagctaatcgtgtagggccttgaaacattgcttctctttttattctgaactattagttaactcttggagtattaatttactttttatggtttctgtttcagagtttatgtgcagcttcccgtctccccaacaaagcgatcagctcaccagcgtcagataccaagccctgttagtccggcccttggcacccagatgcctgtagggccttaggtgtagggagcactcaactaagatttctctgtttaaaaacttctgccacacaggcctgggtgtgggaagaataactaaataaataaaaataaacacttccaaactctgcctcttgtagggattttgaggtctagggagctagccagtctcaaagactggttgccacaaggcaagccatcttcccaggctccagacactgccacccagtctacctccctgcgtctcctttcattctccaagtgacagaatcgtgaagacttagagaccacctaagaggtggtccatcctcagactcactctcagaaccttctccccgtctgcttacatactcctccccacagggagctcctcacttgccaggtgaccccattccatgcttggccagtgacaagatgctccaagacaaggacaatcgtggccccgacctggcactttgagataactcccaaaaacaaaagctcaaacgaaaatggttctcatgttaatagcaccatcatttgcctaccgtgtgctctgtgctgtgctgaacaccgtaggggcacagagaggcagagataaaatccttgtcctcaagcaacattcagtgtagttgggggccagaaaaatgtacaataaaagaatgatgaccccacagagaagacatcaactgctgcattgtattggcaagagcagggcatgggacatcaggctgcagtgtccccaggccacctttaaccatggagaggtctgaaacagctccttccctaggcaggcccatagtcactttatctgtgcaaaaaaaggggtgggcccaaatgatcccataagtgctttctggctctcacgttcctagggacacagtcacttcttggggaagagggggccattgtaggaggcactgaacttaagagaggtgaacggggcagcaccccactcatgggcacatcctagccacactttccctcactgctcacctcccacaggcgttcaatccactcattggttttgtatcatgttggagataggtgtgtgtggcaataagattcctgtgttgcgcataccgtggattgggacaggagacaggcattagaagcctgctggtactgcaagctcacttctgaccaggagcaaatcaaaagagcatgaaatagaaagaggatgaaggagctgagagagcatagtaagaaagttattcaaggtaggagctcaatccaagaaggcttcctgaaagaggagaatgttgaggagggtagaaaacagtaaatgtgaggcactggccaggtctccagggcagcagtgctggcctctccaggtccctgccttgaataatgccactagccctgaaacaggaagcagcttctctgttctcagctatgagatggtcacatgatgaggtccttgcagacatttttgccaaaccacatgagtgagaatatgttgtattctcctgcgcatctttcatttcaaacatctttgcttggcatcttacagctctccccaatctctctgcccccaggatttgctttgcttggtccgggtgcagcgttcattgtctttgttgtttataaagttgaaggatagtgtgcctaccatgatttctcctatctgttgttctcttatttctctaatttggtcttttcaaataaatcagtagaacaaatgtcctctttcccatcccacctccaagctccccctctgggcccaggtgggatgtgctgggagttgggggcctcctcagatggaaaccagtctccgggcctctggagcctgtgcccccacattggcgggtggccctcacaacagcaccccttctgctgcacagaagagaaggtgggatccacctgaggggcagaggccatcagtgctggctgcttctcagccagtgtgtttgatctggaggctaaggacccagcaggagtgaatccaaagagaggaccaggtgggacccaaagctaggctgccagggctcccagcctcacagcctcccagctcaggcccagagacagcaatagacaggcatctttcatgcctcacactccttgcaatcagtggaaaattaagtgttcaaggtggggggacctatttcacgcttttacagcttttccacagaacgaaagccaaggactcaggggcttaattatgtgggcatagacaagctgcctcctgggacctcagtttccttatctgtagattgggcatgctggtacctgcccagacggccttgcagatgcatttggaggatgagatgagagttaatacagtgacattttgaaaaacctaaagtcctgtgctcaactgccagggaagtttaacaatttaattttaatatggtgactgtggcttattgagttttcacataacttagaaggagagaaagggccaggtgcagtggctcacgcctgtaatcccagcactttgggaggccgaggcgggcagatcacgaggtcaggagatcaagaccatcccggctaacatggtgaaaccccgtctctactaaaaatataaaaataattagctgggcgtggtggcgggcgcctgtagtcccagctactcaggaggctgaggcaggagaatggcatgaacctgggaggcggagcttgcagtgagctgagattgcaccactgcgctccagcctgggcgacagaacaagactccatctcaaaaaaaaaaaaaaaaaaaaaaaggaaagaaaggagaaagtggctgtgtaatagcaaaagaacacaaaaatgaggagatgataagcccaccaggaaaagaagatgagatgataagacctccaggaaaagaagcaattgttttcggcataatgactttttaatcagtcagttggtcagttttaattaggcacctactgtacgccagggagtgaactagatggcacagtcaagcaacagagctgtccccagacagaggagagcaaggagggctcagcggcccatcctcacctctggctcacccacaacacccaaccacagcagcacctagagtcctttcctccctatacttgccccaggacccaagcctaacccagcagccaggcctaaggccaagttccccagaccagggttgtgggagggaagaagcaggcaatggatgggagtgtgggggaggcggccttacccagagacacctacagctataaaaagcaccagcgccacctccagaccaagtgagacctgctaatgtgccagatccccatggggtaaggagaaggagcaagcacttcccctggggtgggagtgcactttgctcagccctgggagacacaactagagggggcctgacaggccacttccttagctaccagggggcccgagccaggaggaggcatctgacagcaacttaggggtgccctgctcagtgctccccccattctgctcagaggaagctagatgcacacactgcttctgcagcctgtcatttgcaaaaaccaggccctaaacctcagttatctggtcgtttctgtgctgggttgggcttgtgcctggctttaggttttgtttaaagccccagcaggctctagcctgttactgcgctacacaccatccttgctggcttcaccctccctgccccgaggtttgtgtggagtgggggtggagggcccactgcaatgctattacagtatttgcatttatatgaggcacagaccccaagtctccagtctctgggtgcttttacaactctgtgtatacataatttatttttgttgctatttaatcagtcttcgtgttgagatgaaaagtttccaaggggccccaggttattatgcaacttgcaattccaccagcattgactgagtggatggggtccccagtccgtgctcagctgcaaaggtgggaggcatgggactgggcaggaggctgtgtggttcctgcccacaaagtcagctcaggctgaggtggggtggcggatggcagggtacagagccaaggtctacctcccccaagaggggtggccaagagagaagtgggcagtgagagccgcactgttcctagggaaagatgctgaaggaggaggtgcctgagacaaagggcgtggccagtaggaggaactagctggcctggacttcctgcttcagagtcaggagacagattggagctgagcagggattggagcagctaagtgggaggcaggaagtgcaggtgtgtgcctgacacaggagtcaggcagggcaggatgaggcccaagtgtggggtcttccgtagggatcagtcctaagaagagatgatgaggttgttctattttcctcaataggctgtagaggagagcccctgcgcaaggccaaacggaagccctagcctcatcaagatctccactcaattcattttttaaatggagtgggttataaataaataaccaaacaaagaggcagtggtgtgtgctgaagttcttgcctgtgtctgctagagctgaggcccagggaagaagcagtccctgcatgaggtagcactgcccacttggaaactccaagacctctgacatagacatgcagcagatgctgcatgaaacagacacacccaaacatacacagaatgtatgcaaacacacaggtattcaaagacgctggcacacataggcacacatacacactcacagacatgcacacacaatgagactatagacacacacagacacagacacaccagcaaacacaaagaggcagataaaatgcacacagacatacagagcacacacagaggcacatacacatgctccccaacacacacacacacagacttacacatgcaccttcccagctttcaggctcttctctcctggccacacccatagagggtccttgtaaccagagaaggtaggttgtcaggagtcaaggtagagaactacatttcagaacaagtactcagaggaacacctcccacgtagccagcgatggccccagcccctgttataaagtaagcaagcacccagtgttccgatattccttaccatggcaggaagcacgactccctcaccaagatacggcagcagagacaaggggcatccatgcctcctctacgatgcaattgctcaggcccctgcaaacattattgggaaccaccactctagatcctgggtgcccaggtgaataagacacagtccatgccctcgaagggtcactgggttcagcaagcacttgctgtgtgccctctggatgtcaaaatgatgtttgtggaagagatacagaaataaagaaggcctgttctcagccactagggagtgcggggtgtgggctggagggatcaggcacacttcctcctgcagggcggctgctgctcagaacacatgggggccctacttcagtagtctccttcaggtcttcctgcctcatacaaccctactgacagtaaatcttcctctgagtgctgatttaaagttggtacataactgagattccctaaaagggaattcgatgatcctgtttgggaaaactgaaatcataagtcctgtcaaaggcttttgtgtcccattagctgtactggagtaggtgcagcccctttggatgtgtgagttctgatgcagctactgtggagtgactccttgtagacgcccttggaaacacagccacaccccaaaagatgcactcccatagaaaaacctctctgcttagcacctccttccttacagagacccagagcaggaatgtgacttcaccttcctccctcatcccctgcctgccctggatcatgacccaaatgtcagccggtcaggttcaagctccagttccacaccgccccctccttcacctctccatgcattcctgaggactcagccactggccaaatcttttactttcctctcatcaccctgattattccctgtttaattaaaatttgcttcagctaataggccttaaattagtattttcaaatattgacatctacaggacccttattcattatttttgaaagctctagggctaattgctttaccacccaccaattaattactcattcagtggacaggtagctgctgctcccagaacatggacagacatacttgcaggtaggtgaaactacacatagaacaggtgcacacaagcatgtatgccggggtgtgcacatgcacgcacacatacacacaccgtagacactttctccagtagaagtctggcctagtaaaatccagttgtgcatatatttggggaccaggaggacagcaaaacattgtatgggagacccaggtcttcagtgccaggccatcccctgtctatctatcaaccatgtggagaactctgcaggactggaggcctctttgttcttccttcagtgcagagaacagcagcactgagaggaggtgatcaaggccgaggaaggtcccaaagatggcagctggagctagtaacccagggccttgagcaggaagggaagcccttgaaagccaaacaaagagagtgatgtctccacatgtagctggggaacctgcagggaaccatgcaagaggagatgaggtcaggttgggggtcagggctggggagcctgcagagagggacaggccagggctgtaagggtccccagaggccacggaaaggacactcgagtcaggcccaagttggcttcccccacagttccccgaaaggacccaactgtggacatcaacagatccagaaaaggtctagaacagtccacagagcaaatcccccatgcagccctggggagagctgggtttggcgagttgggtgtttttgcctatgggagtccattgggagggggcccctgttgttcaccaccatagccacctgtgctatttcctgcctgggctattgaaaactttacagaagaacaagaatgtgttcaggaggccaccccagaacccctccacctcctaccccaggccagcaatcctgcacatctgctttgggttggaggaggcaagccccacgtccagctgatgagaggagaagccttcatttgaacaagggccttcttcctcaggctcccgccagactgcgctctatgctgctgccatggtgggcttcacccagggtgcccagcttccccccccccgtgtccctgctgctgccagcacccgccaagtctgagcctcagcccccttgaccatctttttttttttttttttttactccttgtaaacagtctggagtgattgggattaaagtctctgcaagtcattggtatcgcttttcgggagagccaagtaatccatggggattaaagaagcagccgtgctcatctctcacaaatgcatatctgtcagaggcattgacctgttaaaataatgaatttaatgtgcagcaaaccgcacatggcagcggcgacgcaacatggcctggcaaattgttttccacgtgttctaatgagacttttaagggaacagggccgcctgggcaggctgccccgcccccagccctcccgcaccgcaccctctgcagtcccactcctggaaggaagaaggaggctggtgcagaagcgatcagccccgcctgcgcccaccccacttaggaaatgcaatcattccactcaatttctgcaggtttattattggctttgtgggccatttgtggcttcctccagtggctctcccacagctcagcccctgggtggtcattgacaaggtcctgtgtgaccctgggcctctctgtaaggctctgtcacaggacagtctgtgtcccctccccagccactggaagagtggcctagccaccaactcctaggaccaaagctggggtctggcaaggcaggcacccaggtcaatgctctctttttacataaggggaaactgaggctgatagaggagacatgacttaccctcagtcacctagagtgtccgtggcagacagaagaccagtgtcccgatattcttccccctgcccagttctttgtccactttacccttcccccgtatcatcctccccatggccaggacctgtgcttgggggcaggtccagctggaacctgtggaacctgtccagtgctactggggggaaaggcccatagccagagttgggactacattgattccagggcaagggctggggctggggctatgtcctggtctgatcccagtggccactgtccctcaccaccaatgagcctgtttcccctccaggcactgtccctggcagacttggcagagaagcctctccctccctggctgatgtcctctctggggaatggaggtgctacccccagcacctaacagagaaccaactctcttggggaccaaaggtcccctaatcaggcaggccttgatggtaacatgtccatcttccaaggtgtcttcagatggcaaggaccatggcccaagggctttcgccaagcagctgtagtttctgcagatgtcaaaggtcaagtctgtgccaggggagctggctcctggccctagaagtctccaaaggaacctgcttttttctttcttgaatctctatgagctttctccctggtggacgagtgcacagtgtctgctctaatgaggtaattacgaatgacttaatagaaaggcagtgcactctccttttccttcgttcttttatgttttttaaagaaatcatttgattatgaattctttgggtctcaggtattctggcatgcattaataaacccacagttaggaggcaatctgggagccaggagggcttcctgcagcagctgcctctcagagacccctcaggcaccctccctgcagctggcttcctgtctgtggttgactcaacagggaagggttagagccccggaggggccttgtcttctttgttccaaagcagatacattaatggacacgtacacagcatccctatttcaacctgcaggactacaatcctgtcatcagcccacacacgaggccggtagcatcatggtcagatgatccgtttgtccagtcatggccgagcaccttcaggttgcccagtcctgggcctggcagaacaggaaacccagagagttgtaatagattatttctgtcctccagaatcccaaagtcctgctaggagtcacacattcacaaatgacaattgggtcccacagcaatataggatgtgaccaaatgcccagagaggggcagagagctaagaacctgccttggggaccacagtggccagagagcactgtgcgggtggggcgagagtggaacaggtgcaggttgagggtcagattcaggagagaggatgtgcttaggactaaaagagcacaggaaggaatagcaggcaggtagcaagagtgtggcagggtcaggagtgtgtggagcccaatcccctggacttcggagcttagatggggaggttggactactcatctagccacaacacaggatgagtgagaagggtagggggaggaggcagccaaagctgggctgagcttaacactggtaaccacgtagctggggaacctgcagggaagggcagtggtgctccctcggcctctgatcctgtgtgaccacaggcattgctgctagcaactgggaagtcttaccccaggccacagcataactgcacaaacccagttaccagcatgcaaaatattgcttgtaaatgctatcgggtgctcagagtgcctgagggaagaggtgcttggtcctggagctaggccacgaccctccaaggcaggctgtaaggccacacggggtggaaggccagagctccttctcctccttctgctctctgggtattgccaccaagccctgtacctgttctgaatcccttagcacccctttctccttggcaaaccactaccatttcatcccttctagactgccctctgcccccagcctcccgtgacagcccacctctccttggctccatacgcctgcatagagatcttgtcattcagggtaaagtctaccagcatgttagataagccctcttgggataaagtcaagagcctctcgttcctaggccaagggagctaacagcaaatcaggcccttgcaggaaccacatattagagaagggagctattaggttcgtgcaaaagtaattgccatgattttcaacggcaaaaaacacaatttcttttgcaccaacctgatagatcattccaagtgcatggagcaggaagttgtctcaaaaggccagacagcatgagtcctagaaggcttctcggtggcggagacctctccccaggacttagaagggtggataaggaagaaactcagagatgaggaagagatggcatggtgtacagccagtctggccaaaaatctgttccttatggagcgagaaggtgggaaaagcatgatgaacccccagtcaaagatctgtgagcctctcagctatggtgcatctccctgaagcctcccaaagccattctcctgaaggtttcaagtggaggcaaggaggagagggagcctagggaggcttcctcccctttcctagagggcttagggatgagtgaggtgatggcctcaggagaccaaggccatggctgtcaccaggattttggtaactccactgtttttgcttctcactagaatagcttcgcccacctgccattgctgggttgccctggggcctggaagaagaacaccaggccagggacctgggaggagtgagaggacagtcacccctgctctccaccaagaatgacttcaagggtgcctcactcaggcccctccttttaccaacaatgtctctgagctcctcctaagcccacctttgaccccgcctcctccaggcagtcttcccatcccactctggccccacaaggactcctttccatgtgaaagccagtcccccgaggagtcagcaccacataagacctgaggagcctggtcaagctcccagtgctgtttatttcatgagaaagaccctggcagcctacctggacgtggatgagccaaggacagggcacacctgcatctgtgccccttgtcctcaacccatcttcctggaacactcagcactgcattaggcatttcattgacttgcctggagctcatgagccagtctctctgtctctctgactctctctgtctgtctgtctgtctgtctctctctctctctctgtctctgtgtgtgtgtgtgtgtgtgtgtgtgcgcgcgcgcgtgtgtctatgtgtagaacctgcacaatgtttaggcaccgctagctgctcccatatcctacccagccccatgaagaagcagagaaagtggctttggaaatgaggtggagggatgggcactgtactgaagaaaacagggaaattttgcgttgtgctcatggcagaagcgagaagcattcatgggtcatttctgctggggaaataggacgagggatgacttcagagccttttcattgagaaatcaggagtgggggtagtctctggccagcttccctggcataaaataacaaggtatggcttccctatggccacgaatgtaacagggcaactgtacaaaggcagcatgccctaaacccagggctctctctcactttcatgcatgtgctggcacatgcatgcatgcacacatgtgcgcacactctggcctgctctttctcgggcacacattcactcctacatgcttaacacacacatccatctctcagttcttcttcaggtacagctgctccctcctccaggctcccaggctcctctcctggttcccccacttattcctgacacttgcagtgctgactttgctttttgagtgttgcattaagaagtgcaggggcttggggtcaaagctacaagtgtgctgggggaggggagctgggagccaatcagctcctccttcctccctgataaatgtcttgtttgtttcactgaccacatggccgaaacagggaaatgcagctgtgtttcttattcagccacaagggtggcccctgactggccatcatagttgggaggcagctgccattctccctgctcccatctcagtgggaggagaggagcctgcaagagctgcctggggtctggaatctggtccttacacaggccccactcaggccctggcctcttctgtgatctcctgggagaagtcgcctccccaccacattcagtttcctcacttgtctagccagtgttataatttgttgccccagcacacaactgagcgccgtgtcttccagcaagagggatttcagttagacaggaaggaccagcttttgaaaatgagagttcttaagggcaaggctccaggaatatcttttctccgtgtttgctcacattctgctgctttctaaaaagacaccgcgtgggtgaccagagggaggtgtgaggattgccttccgaggagagaatcaggccatgctaatccatgctgactgaggaaggcttgaattcacatccggtgttttacagctcacatttcacaggctgcgcgtgactgtcctggaattggcttggccattcttttgctccacaagcccactctcaaaagagagagcaatgaccgaactcagtcaccctcaagcctgagcctccgatctgtttatcacttggtgggctcccatgagcccccactgtgtgctcaggccacaggtaccccaaagaagaggggcacgtgcccatggcagcaggcagcaggtcactgtctggctgggagacatgactcacacgcatgacacaatcaaggacaggggtggccgttaatcagggcaggaggctggggttggactcctaggctgccttcttcattgtaggcagagatgcattcagctggcctaccacagctaaagaagaaagctgtgcggagcccagggtgttagtgataaaaccgccctgtgtttaaggaggctgcacagccccacagcccctgtggccaggccagccagtgcgcaaggagggagagaaggcagctgagtaggaaatgctttggccagggagctgggagccctgtgttctaatcccagccctactcataacatgcttcgtgttcaatctctctgaaccttagtttccatctcaacagactgagagagtggggttagccctgccccatgacccgggcagggaactgtgagacacttggcagtatgtgaatgggcctatgcccggagagggatgttggggaggggatggggaagaggcagaaagatcaggaccaaagactcagcagctcctacacttgagtcaaggagttggaaaggaaagaagaggaggagggaagaaccttggctacagagactaggaatgtcctaggttcaagccaagttcttacctgaattggatgggaacaggactacaaaacatggcatgaggctcttaatgggaaaagcaaggtcatttggtccctcaaggctgccaggtagaccatgaggcagggcttccaagaagctgggagtctctgatccatgggaaggcagggcactggagagattggtggcttgtgcctggcttgcagtttgtgctcagaaagctctctctgtgggatgcaggaagcctgtggctccacctttgtggtgaagcaatgattccactagccaggttccaggccccatgcttggagaacgagtcacctgttctctagcagaggctgggctatcctgcaagcacctgcaccctctccctgccacagcctgccaggcagacatccccacagccaggaggtagacagagtgcccctccacccagtgctcccagcacgggtcccacccccacacgttggctcacacagttccatgcatttccctctctcgccacccagttcaagtcccacctcctacacaaagcctttcctgaggattcccgttcacagccattctcagcacgccacactatttcattcactcctcatcggaactgtgagctaagtgctgtcatcctcttaccagataaggaaaccaaggtgctgagacattcagtggctgcccagtgttccatggctagtgagcggtagagccaggttttgcaacccccaggttctggctgcagggtctgcaccctaaccatgaggccacactgcctctcccagctgctgcctgctatcagacactggacctgaattagcccctgcagctccttctattttgagggtcaaggttcccccaccacatagcaggccacttttaggccagggcttggatggcctcggtccacccttcccacccccaagcctcccagcagggtgtcaaaagcatgtggatcaatgtgttgctggataccaagagcagatggctcacatgatgactagatgtagctgccagaaccccggagtggccgttttgtgagtccttcacagaggacacccttcccgccgacctcgggccaccacagggctagattcttccccaagatcctcgctgtcagccaggctggcctgaagctgagggtctcctgaggagcagatgggctgttaacccagacaggactggttctctctttgtccttaaaaaaatcctgtagggaccctccaagtgtggagcaaaccctcatcatcccctgggtcctctactttgggtaccggagggcgtccctgagggttttacagtcttgcctaagctctctccaccctctcaggagaggaaggccaggctgaccacctgaccagcataggagaacgtgtgtccacatggccgcctccctcccttccccctgaccacaccctgaggcagctcctctccccatccatcttccaggaatgccaccatccttcctggtccgatgccagttcccaggcctgacaacattccatctcccaacattcctaaagcaggtgctcagggggtgaggtttccctgcagtcgcatacctcaactctggccccatctctcctgcgtcttttcctgactcacagagtgccagtggttctccaagtagaacattccagaaggactaacctcctcctcagtgcatctttcttgagttgtgaccctgaagatacttctggaattattttaaagaaatgcagtttcaccacttaaaagtccaattcatttgtaaaatccatgtaatcaaacaaaagagtaaaaccgatattgaataacaatcagtctgtaacattgacttagccccttctgggtgcttggctctgcactaggtgctgaggaaatagagaggaacagagcagtgccccactcttgaggaagatgggatcctgtatctatgagttcactgttggacaccccagctccagccataccagaggacaccagcaggtctcccactcttcatccccagaagtacacctaccatgtgcacctatgctagactagacacaggcacagcatgaaatgtcagctcagtattccagaagaaattatcaagcacacctaacctttgctcagacagaaagcctggctctcagagaatgcacacatccctgagagcaggcacccattcagtgatttgagaagctatgagcctttggcaagttcctgaatctctctgagcattagtttctcctcttagaaaactgatcaatgatcttcctcctgtctgacatgtgctttacagtattttttgattagcctcagcaattctacgagacaggcagagtatgtgttattattttggaaatgaggaaaatgtaagcgaggccaagtgacttgacctaggtcacactgtgggaggaacacagccagaacccaaacattctgggtccttcttcactgctttttccagggttgggctaggtgatttccaaagtgtcattcactgtgaaaatgctatgacattgaaaggttgaggcagcagggtgtgtatgaagccaagtctaggaaggccccaaaactacagacagaggctcagtggggggcaggtggtcctgagaagagagagcagagccactggggagacaaacaccaagagtgagcaatggggatatgctgactgcttgtggtttacaagggtacagaaatcagacctgcccgtgcttgaccaagtttgaaacctccatgctacagtcattagatattttaccaatgtcccccactgcccacctctggtttgtgtattcaaaagcaattgccaccagcaaagctcagtagtgggactgctcaccttccccaaccatgtggatttccaacttggtggggagaggacagaaagagaactggggaggaaagacaattggggcctttcatcagatcacttttgccttgaaagataggtggattttcatgatgcccctcactggtagtgcttccaggaaagcaagcataccaggaaagtaggcaggttccagtctttaaactgagggttaaaagcaagtgttcaggaacttgaagctcagttgaccccaaacatccttcagacccataagctatcaatcacatgactcattatgagcaggtgatgtttcttaccccacccctttgtgggtcttggctctgaatggtctttgcagggagtctaggatatccagagggtctaacagcagctacaggacatctggatggggttgacatggtcaggatctggccaagattagaatcagactggccttcacagtcctggtgaggatggcatctgcaggatactgtcctactgaccccgtctctctcctatttgacctgatgggccctggagcagcacttttcctgggagagctggtggttccagctactggccagtgctgcaagaagcacctcactggatcactgcaggacctgccctacgggcttccaaagggagatagcaccacttggccaacagaggggcttcattgagtctgctgtattctgctgggcagagtcctgagaagatgtggggaaggatcttgaacatagggaaagggagacttgcccacaggttaagtcggagaaattggtaggcaggagaagtggaaaggcaggggaagcccagtgctctgtctctgggccattggctggaaaggatctgtggctggaagaaggaaggggttagaggcagctacctgctccccagtgactgctcattgctgaaccatccctatggatgggcatgtttaccccccagacccagctcccaagcagccctatctcctgcacttggagcccagtcagcaagttctccctgtccgtaaactatacagaggtgcaattgtgcaggcctgtcaggatgcctgggcagtttcccatcacaggaagacttcattctttattttcttttccctttttttctgttttcttttcttccttcctctctttaatgatttcctttcattccttcttccttcctgctttctcctttcctttcctctctcttctattctcccttttgcatttcttcttgtcctccttcctttcctcctcctttgtctacttcccttgccctcacttcctcttcccttctctgttccccagagagatgctaccacctctagcatttccacctgtcttgcttctgagcctacctgattgcagaagtgcattcccgccttctcaacacaggacagatgcaacagggagcgtgcagcccaaagagggagaggaagaccacagcctgttcacagggccaggacacactggagtctcccatcccctagcttcctgaagacccagccctgggcttgatgcatgagaagacagagaggccccccaggctggctgagcagtgtgcccaaggatcccctgggtcctgtttttaaaggctgattccaaggccatggtcccaggatactgattccatatgtctgtggtggggctccagcatcttccttgttaaagtgcagaccagatgatatgaagcaggtaccaagatgctttggggaatcttgggctaaaaagacaagacacccatgtgaaaaccatatgcagtcaagctaaggactagagatttccaggatggaagctagaggcttagaaaagctggggctcctggaggtgaaacccaggagctgggttctgacagggggaggatctgcatgggttgtcaaagaagggaggattacaggcaagagcaaattatttgagtcagatacttcaaatggcaggcaatatattggatggatggatggatggatagatgaatggatggatgggtggatggatggatggacggatggatggatggatggatgacctcaaatggccccaagggaccactgggctctgccttgccctgtgtatttggtgtctatggtttcaggccagggctctaagtggcacgagatgctccccaaacctctcgctcttccactttccaccaccctttgctgttttgccaccttctgaaagataccaaagagaatgaaggttaaatctgacccttcctcctccctgccccaccctgggcccaacattcagagaagagttaagtgacagagcctcgttctcctgtatgaattaataattgattcagtaacaaatcactaatattgcagtagtcgtggtgaataagataatgaatgtgttctgtccagggagtgtcatgttgtgaggattcagctgaaattattcataaatgtgctacttttcctcatctccaactactgctagtttagctcctctttttaatcttcccaacctgccacattcgatggtagaaatcgtcaggctccatatacagcagaatattaagggggaactgccaaggcattatgtcaaatttcaataggtaataaaaacaaagtgcttgaagaccattttccacttctcttaaagttaaaaaaagaagacttccaaaaacctttctagatgggcactttctcccatcattggggggaaaaaaacctgagttcaaggtattcagaaacttgggtatgatccccactttaccacaaagttgctgcgtgactttgagccagtactcaaccatcctgggctaagtctccaatctctaaacaaggggtgcctccctgcttttctcctgggtgtcatgatgtaattgtgaggtgatgggaaagaaagtgttctaggccactaatagatagctaggctggattttctccactatcacaccctacaccagccaggtcagcaggttcactattctctaaacatgccttccatgtggccaccacagagagggcccctgccctcctgttcaccctccatgtctcttcccttctccatctgacccaaccagcactctgggctcagttcagccaccacttgcttcatgaaacctttcctgatcctgcctgacagacatattttctcctactccacatctccccagagcaccctggcccactcttacacatacctcttacactgctttccacataccatcttccctagtagactgcaagcatctcaagaatggaagttgtcttctacatctttgagtacaataagaaaggagaaatatttgtagaatgagtccactggtggatgagtggggagatggatagatagatgagtaggtgggtggatcggtggtggatgagtggatgggtagatggatgagtggatgggtagatggatgagtggatgaatgctggatggatggatgaattagggccgggctttgtggctcacacctgtaatcccagcactttgggaggccgaggtgggtggatcacgaggtcaggagattgagaccatcctggctaacacggtgaaaccccatctctactaaaaatgcaaaaaattagccgggcacggtggtggctgcctgtagtcccagctactcgggaggctgaggcaggagaatggcatgaacctgggaggcagagcttgcagccgagatcgcgccactgcactcacaccttggttgcagagccaaaatccctttcccaaaaaaaaaaaaaagaaaagaaaagaaaaaaaatgagtagatgggtagatggatagatagaagaatgggtgagtagatagttggataggtggatgaatggatgggtaagtgggtgtgagtgaatgggtgggtgaaagagtatacatgcgtagatggataggtggatgggtagatagatggatggatgaaagaatgaatgggtaggtgggtagatgggtgagtggaagagtaaatgggtagatggaggcatgtatgcaagtatgaatggatggatagatagatagatagatagatagatagatagatagatagatagatagatagatgaatgaatggaaaaataagaaacttgaaactggcattatactgttttcagtcaatgagcaagtgtttgccgaatccctgccctgccttcatggttatctctgctatgtcaggttggaaagcagaaaggaagtgtcaatgacttgacactgagagtgcttagaacaggatgatggtgatcagactgggttggagagtggagatcatgacatcacagttgacagacccttaagatgggccttttggaggccttaatgtggcccctcaccctacaaaggagacttatggtacagagagtatagacattttgctcaactatacagcaggttggaagggcaagatcctgggtctccagaccaccatattgcagttcttccttcacaccagagggcactgcacataagggaggatgataggctccttggagaggaggaatggggctctggaaggatgtgggacttgaccaagtaaaaagcactgtcaagtggttaattctgattctgccaagaaatgaaagaggatgaggtgccctctcaggactcaaccagcttcagttgactgagattttttccataactggtccatggggtcatctggattaggagaccagactaaagaggaactgtagaacaggcgatgcccaaaatacatgtcacaggagtggagggcatggaggagtgggaacaaaaattgtctcatttcctgtgtggcctgttttcaggccctctgtacaaacacaccccaatcaaatcaaaacctttccaacatgccccacaacatacccttacacagccttaaccacggagctccagagcaaatgctgacattccaccaccccctacacacacagatgctcaccgacataggtgaacacacctacaggaacccacatgaacaaacgcagaaatgcaccccttaaaacacacatgtccacccacacgtgaacacacgcagacacacagacatgaagaaacaggcatactcatccaagccttcattctgagtaagttattaaaaatgtagacatcgctggctcccagggtcaatatgttgtttttaaatttaaacatgaatttccatttcattgagcctccagggctaacaagatgtgctgtgacaggagcagctagctggaaaggcatgattgaagagcgagccaataatgtgtgtgcacagcctgggcggggaggggagcccctctgcccagcccccgcagccttctataagccatgagcaggcagtgagtatcattactactactcagcactgagttctgacccaattcaccaaccaacctcacaccgagaacaactgagaacctcacacacattggcgcggggagtggcagccgctcagtccagtcaacacctgaaagtggccctgaggccatctctgcctccatcattctcattggcctttctcatcccaatattagcagccaaccaaaatttccaaagctaagagagcagagtgtgatgcagaagtaacatccattcattcacccgtccatacacacatgcactcatctatccatccattcacccattcatacacacatgcacccatccatccacccacccacccatccacacacacgtacccgtccactcaaccattcacccattcatacacacatgcacccatgcacccacccatccatacacacatgcatgcatgcatccatccatccatccatctatccacccatgcatgcatccatctgctcacccatccacccatgcatgcatgcatccatccatccatctatattctgtgaaaattcaggcctggactaaggactgtggaggtgagggcaagaagaaacatgctgtctctgccccctggaatctccactcttattgggataagatgtgtttctcattgaaccccagctgtaccctctgtatcctcagacagcaccagacactctggtttataacatgccataagcagtctccgtctctgggctggaagttctgcaacagaaggtatcatatctgttttgtccagcaatggacattcggctcctaagccacagtaggtactctgtgaatctttggcaaacttgaatgggttaaattcaaatctggacggctgactcagaggtcttatgtggttgtattcttcctcatcccccagcatgaaggagggaagaaaataaagaaaacaccacagcaaagaaaagggtgctgagtggtcaggatctgctccatggaagaggtggatagggagatgaccttgcttttggtatgccaggcggctggagggcacagttaccctcctgcaggagaaacagtggctaggagcccctggacacgggtcctggctgggagggaggcacagttggcacagctgaactaggccttgagagggcctatctaggctagcagggagctgcaccacttccccatgcagcccgcctcatctcctgcctgccactgcccttctcgataagctgctgagctgcccatctctgaagcctggggagagccctgcctggtgctggctgctctctgggtttcagggaactttgattaggctggacttggtggattctgtaggattttaggtatcttgtgtgttttaaatgccagttaatacctaacgttcttcacccatcagaaagtgagaagcaagtagcagcagtgcccctcatgaataagtcaccccatggcctcacctcctggagatggtttggtcaaagccagaccctatttttcttgccatgcacacacacatacacagatacccatgggaccaggtgccactggctaatgtgggaccatgttccctcaccctcacacagcctcaacaatgcagccacatgcccacataaacacacacgtctcccacacattgggatgggctttccctctcttcgagacttctgaactctgaataaatttcaaaactcttcccttaaaaatcaggctatttgggctgggtatagtggcttatatctgtaatcccaacactttgggaggccaaggtgggaggatcacttgagctcaggagtttgaggccagcttgggcacatagtgagacccgtctctacaaaaaaatacaaaaattacccgggcatggtggcacacacctgtagtcccagctactcaggaggctgaggtgggaggatctcgtgagcccaggagtttgaggctacagtgagctatgatagtgccacttcactccagcctgggtgacagagtgagacctcgtctcaaaaaaactcttggtttctgcctttgggaagtagtgcctctccccatctctggatctcacggatgcagaactccaggatcaagggagcagtgcccctgcagggcagctggaccattcatttccacttcaggccttgaggccaacagcagcccagccctggcaggggattttacaggcacatgtccacctcaggctgcttgtgtgccctccttgcatctgcggtgacgggggtgtgcaggctgactcacgcaccctaagtcacttggtcatacatgcacacaggcatacaatatgcgattgctgggcacactctcaccttcacatgccacatccgtctaccccaacacacacgccaaaagcgtagatggcctatgtgcagagacagctctcaccagcatgcacactgaaggtggctggcacagcgtgtgcagggatgcccacacgcacacacgaacacacaggcatgatgtcaagccctatcgtcgggtttgccagcccgaggttctggtagcccaggtgtggagtgggtgggccgggggacagcgtgcccacactggcctgcagccctggaccttcatgtgcccaggagtggaggcccaggcctctggccctttaaacatccatttaaagtctcatctctcaaataattcagcagaggcatcagccaaaagggcacactctcctttccttgtcttcaggagcagagaaggaaggagacaggggagagagtagattaattgggcctggaacaggagccagggattgtgtaagcctaggctgccagggaggcaggggcgggggtagggagagtccagctttgctcttctcctctttctgtccttttcctgtcatgctctcccgagaacctcacacacatcggcacggggagtggcagccgctcagtccagtcaacacctgaaagtggccctgaggccgtctccgcctccatcattctcattggcctttctcatcccaatattagcagccaaccaaaattcctgagagagaagagctttcaggctgggcccagtgggtgtgcctggccctgaggcgctgcatgtgaagggtcactttgtaaagcaaactctgtctgcagtgccccagggagcccagaatggcagaatggcaggtggttgggcctgggcaggtaaagcatgaaacctaaagcaagaaacccatctgtaaacagagccctgtccccttgctaggtctcaagtatagacccagagtcctgacacttctgtcccctccctaccatgtccctcagctccccctcctgtctttgtcacctgccaggttctgtcacccattctcttcaccccccgccagggtctccctcactctggacactcccttccctgatgcagccccccacacttggctttctggacctcgacaacagggtgcaggctagggtctgcctacccacttttcagaatagcgtagagtaaaccagatacacaagggatgagcagacagatttcagctcagtgaagagcgtgcttacagcaaggggtgtcccaaaacacagcaacctcctctgcagtaactgtctgcccaaccctcccccacaatgaggcatccttgggggactgcaatacccccaagattcctcctagctcaaacatggtgagtttgcccctcagtaggaagcagtgcatcacatcctgagggggccctccccattggctgccccctggctcctagttctcaggccagtcatcaaaagggcaagaggcaccaaacccattccaggttttggtcagtcctcccagaaagctggtgggaaagtgtttattcatgtgggaaatcaaatcgccagggagagccacatttcccagcacatgagtatgtaggtcaggctcagggtttcttccgcatggccaccctttgggtatctgaggacagtcagcagtcctggcccctgcccccacaccctgagccttcatttggagtcattcagtcaacccatacgttctaagcacccggtgcgggggatcccatgatgaattgacagacctttctgcctgctgtctggaaagggacccatgcaggactaggacatggcatctgtgcttcctaagaccagagctaggagagaggtgggcaggtggagagggagacaaacacccccacacaccacggagcaggcggcgatacctgtaccctgaagagctgggtggtgggacaggaccaaaaagagaagcccgtgttcgggggagggtgcgccgggtgtccccagcctgaatccagactctcagacttaggagctgtggctgggactcaacaaagggcagctgtgaaattctgagaagagccaaggggaaaggagccgagaactgggtcttcccaactctgcctccaattctaggaaacgggaagaatcataaagtgaagtgtgatgaggccttcagatttgccagacttgtatggaatctccaggcttcctcctctcacatcctcctgcacccccccccccccgcaccaaccaaagggggaaaaaaaaaaaaaaaccttcttgatttttccatgtgtgtagtcagggtagctgagaaacagcagattcttacgttcctggaaagttgggtgcttggtcccttgcagtcctttgaaagatatggttcagggtcttcctaagagaaagacagtagcctcaactcaaagaaggaggcttcctgaaggatgggtaccttgctcataattcctatcatggatatagaattttaataaataatcctgcttactaataagaacaaaggagccacttgtcttccccagcccatcagtctaagagcaggagaccctggcatgggagagaggagggcggtgaggtgggaaagaggaaaggtagacagagctagcatccagtgattcagagctattccaaattccactttctgccttccagctgcatcccagccgcttctcctcactagtattctgtgccagccaaatttcggtacacacagtgttgcggtttaaccagtccttttaaaaatccttttttttcccaaaatcaatgtaaaaatattctgtggtacagagcagatttgattaaaaaaggaaaaggttgcctgaaatatgccccccaaaaattgagctaatggaaatctcattcattatttaatctcctgcttatccgaataggaccagaatggaatccaatatggcatgtgcagtgttgtcctggagagcagacagaaggcaaggagcaggggagggaaggacagatgcagacctgccatttcacttcgtatattaaaccagactgcaggctgtgaaccaggttaataacaatatttattgttattaatgcctgaacatcctaacgtgtgcgtttgtatgtatgtgtgtgggtatatgtgtgtatatatatacacatatacccacacacatacacacacatatatatacacatatacatacatatatacacacatgtacacacctgtacacatgcacacacacatatttatctggtatccattctcttgtgttacactgtgattcataagctgccacactactggactttattaaacacagataaaatttgtctcatccagcaacagcccatgaagtgatgggacccaggaatggccaggcaggtgccatgtctgctcactcatgctgggctggcaaaacctgcctcattctaaaaagagcctggcaggaactggagtaaatatccagcagccctctccctggagtgatgttgttgggtagggacaatgttttcggagagtttcccgtgtgcccaactttatgtacactggtgcctttaacccccatagcagttctgcagataatatcatcctctctgtcttgtaagggaggaaagtgaggcacaaagatgtaaggaaactggcccaggtccaaagaagagtaagcagtaggtctattagatcctaaggtttgttttcttttttcaataaaccatgctgtctttcctgaggtctaacaaagtgaggtctgaccttccacctttgcttggatggatgatagacacatcagcagctctcccagacgttccattttgttcagactggtctccttcacccgctcctagacaggcccaccttgaattcctggctttccccattcccccacttccccacaaccccataatacctttcctggctttcttccaaaggtccaattcctctacctgccctacccaacttctattccctgaggtctagctgctgagcatctgatgagtacagggccctgcactcaaaggctgcatataacaggcaacattaggggttttccttttcttcaaccctggcccacaatggagcaaccaggaaaatattttcttctttcaatgtgctttgtgcttgggtaacaaatgggtcaggtatattgggacaacagttgctcagcaaaaggccaccctccaagttgtctatctgtagatgatttatcatgcaggtcctcactggccgcactgctcaggttcccccaaggtccagcagcacattcaccctcttttccattccagcaagcccatagcgcaggaccgtcagcctaaaccagatggatagggacgtatgtgggaggcagagagacctttcccgtagaaggcatgtttttagtgagctatcctgtgggcttatgctggggaatctctcctccctcttctgcagtcccactgaccaaactgaactggggtgcatgtgtggggctccgaggatagagatgggatgggtgtgtcatcccatctctactgactgctttgcctcctttaaagccaaccagggacagctttcctttactcctcatatttttgaaattcagtttgggctgcaggggagtttaaaaaaaaataaaaatggagcagggcaccaaacaccctatgaaacaactcagcgaggcagtttctccagcgaacctgcgtcttctatcttctgtgacaaaaagatttatagcaattttttattaaaaaagagagagagaaagagagctgcagataatcagatctgaggctcagaaatgggagcgtgggggtgttatgcatgtaagttattttaaaatatatgttaggttcgtgatggatttttccactcccggctggaggggggccagcccagccccccaccaccaccccatgcctggcctgaagtgatggaaatgatgtgtgaaggggacagacagagacaatgggacctcccccactaatatctcacaggcactctccctccacagccaaagcccaccgccctcttccctcaacaggtagagaggggactcctgcttttagcgggaagaacatagccacaggttcttaaaactgaaagcaatcttagggaccctctggtgttgagctaaaggcctattttataaatgaattaaatgatggttatagagagaaggcttcccctgcattttggaacacaaagatgggccttgctggccttgttggtaaggtgtacacatctctctgctagttctctaaatcttctcagtctcctgcatcccggggcagagcccctcttcgaaggaagggtagaggcaggaagtggcgtgtacaccacagagaaagaactgggcagaggtggcgggatggttacccagtcctgagactgagcagagcacaccttgggtgcagagatctgaactagcagaggaaggggcaagggcaggagggtgggggagatgtgatcatccctgtggatcatgcccctgcctgaggaaattcctcccacacagggaggcccaattccatgggacctgtggacaacactgccaaatgactagacattcagctgttagtgaaaatgacaggatgacaacgtggaagaagtgtctggaaaacatgtcctatgaggaatagctggaggaaccaggaatctgaaggaaaggacacggggggggttggggcctgctttcaggcccaagcccagccagctcagagcagagagtggccccgtgggtgaacggctgggtgcaggtgtatgatggacttttttttgttttgttttgtttttttacaaggaatgtttgtttggtgggacaaatagcaaagacattttagagggtgggacagaactaataagaatgctgaggcaaggaaaagcatgcgacaagggatgggcagtgcttaaccccaaaatgagtgctaatggtggcatgccagcctccagagcagattaacaaggaagatgctagaaggaggggctttctgagtgccttggacctcactgttagggcagccacacctccacactggtcttggtcacaaggtgtacactctccatcctggctctctgctttcttggggtgcctctgaatcctctgtgagccgagctccccaagaaccaaagtgtatggggtgagagtgctggagcaggtcgagccaggtgggcctggctggagtgatgtccaggcccaggcacagcccccatgtgagattcccatggcttcgggagggccctgggcatccaactgtgcacttgccccatcaggcagggcctggactcctgttttccaagttccctgccctgtgtctatgccccagatcctactccaccactttgccagtgagttaataagctgaaaacaaacacttaactccagaggtgccctgcatgaaggcactccaggatttggaaatggggggcctcctcttctgtggggtgtagtctggagaccagagaactcctccactatgtgactgagaccttctgcttccctttgggttcaagaaccgggcatgagctgagcaggagcttcaggggttgggggatgtgctcgaggtcacgtgcctcaacctctccaagttgtagctgtcttgtctataatgtagggttaatgaacttgctggctcaggcctgcccatggggctgtttgaggagtaactgtgacaaggcatgtgaaggcctggccgggccccagaggggaatccgggaatggtggtcaaagatcccacttcaggtggaagatgctgactgtaaagcaccctgagtgcctcctggacagatggcctcacagcggggggcaaagccatgccaaagccagccatgggcactgagagccctgaggtaaggaagtggacctctgagaataggaatgagaattagggctaaatccaggggagtctgtgtagctgagaccatctcagaagagggtatgagcagcactagcccaggaggcccagtggctctgtcccagccacagcatctgcatgagcctgcacacatcatttcatgtgcgctatgtaaactccgacacgtatcactcacgcttctgcctagggccgcccttctgcaaaggggaacacacacctgcgctgtcctgcctgtcccacgccctctcagccccacctctagaggactgcacaccgtcaggcacagctgggccaggccgcacagcaacccgggcccctgccagcacacacacccaccaccccctcgccacatgctgtcacacggagtcacatgcaaacatggagtcacatggccctgtccctccactccagccatttgtccccagccctccctgtgggccttgtgtgactggaggaggagcacagagagccacaggggaggggtggcctcgcctccatggagggtgactccttgtgttatttttaaacattcccctcatttgctaaatgaggctttcgctcccaggctccctttgaagcggctgctcctcttatggaggggggcagggagacagtggcctgacagatgcttaagaaattataggcgaaacttgctgactcaggcccgaattatgtgctgtcccgggactgtgtttagtccaatgaggactgctggctggcccgccctcccccaaccccagccctcttccttctctctctgcctgtctcccctcctcgccccatctctcccctcactctcactgtctcagattaggcatctttgccacctcctccttcccttcctcccagccctccttcctggggctggagagcctgcccagtgagggaaaagatgccacccccacggagccacaagaagccacatggggccctgtgcatgccaggactggggcctgttcaggccatgcatggagggtggggagggcagaggaaggctgggggagaagggcccagggaaggctcctcagaagaggggtccttgagctaggcctgcaggaaccttgaacttgttaggctgtggaagggcacagggctgcccagaagagaaggaacagccctggccagtccccagggcagagtaagctaggtgtggacaaggtgggaagctctgttatggggggagaaagatctttttgaatttcaaaagttccttttggcttgaacttttacttactctttggcttactttttgtctttctctttcaccttttccacattcagactctggctctttgctggaataaagaatgacaaagagcttctaccctcaccctaccccacacctactttccacctgccacctccaagctagaaggattgagaaggggctcccactcagaacacaaggacaagaagaggggggtccacccaggctcaaaggggttagagaaggggcagctccctggggtccccctgaccctggaaccctggaaacagataggtccatggaggtgagcagtggtatatgttccaggcaggtgcaataggagcgtttaggagcaagagcgagcatccttggggccccaatgcctcttctcccatgtgggcaacctgaaagacggatggtaattaaactggaatgcaaattaaagtggttcagaccaaacacttatggattcacctcagcagcctccctgctcatccccagcggatcatgtattcaccgcctcagcatgagaaggggcacatcccctccaggtggcctcagaaataaaaaaggaaggaagcccagaggtagagtccagatgcctgggtttcaagtgagggagttggaggcccagagagctgcagtgatttgtcccaactccccagcaaactgatggcatactcaacgttaggttttaaaggcagacagccccaaggagacagtgggctataaccagagagtgatgcacctgaataggcaggaagacctggggtctggcccaggcctccttatggatcatgccaggccccaggtcaagccaactcagggcttgaaatgcaatatccctttcttgagccgagtaaccttgcagcccctagggaagtgagaggccagccctgtgtaagtatgctttggtgggaagaacgctggatggtgtccttgtctatctccccattcaactattagctaaaggctgaaggatttctggctcatggctggtgtcagggaagtctcagatccatgtcatggagtggtagaacattgcctgagctgggctctgtggctcacaggctgggaagtcttaggcaagctcctggatgtttctgtgtcttggttgcactctcaagagaactggctcataaggctgttctgaggaccaaatgatttaatgcatggacagcccttgacctgtgctcagtgaccttcagttagtattggtctgtaagatggccggatcacactctgaaaggcactttcctgagtccttgccccacaaatgcagagctcactgcctcttccatgaagcagtgttgctcatcaggagcccaggacagggcctccacacagtaggtgcttgctgagctgccagacacagccaaccacatgaaaggtttcatcagctggccttgcagttcaattttaaaggagaggatgacctggtgggagaagggaagttgcaatgaacatctccatgtccgtcgctttcttttctgagtgaagaagacctacctacaaccatctgggggtccagcagaggagtcactggagcctgagcattcatcccagctgccagtccaggcccccatctaggccctgcctcacagctctctgggaaccagtagagcccagcagaagcagccaaggaaggacccccacacctactctattctcagagccagcccccagggcccctgccaggcccaacactgcatcagaagggcccaggccccgctgggatcaagctgttcccatagtgacacacaaatcagccgccctcagccctgtcatttgccagaacccaattcatgagcctctaatcaataattcaggcgtctccatctgtggaaaactcggatttggcctaatttctctcataaacaaagaacatcatctgctcataagagtaaaatagacaccagtcaaatttctcaaaaactagagattcccatgaacggcattcattctgggtctgggatgacagaatccagcttgcctttgtgaatactgtgggcaggctgggttgagaacacaaagcctggtgtgggaagctggactgggcagttggttcaatgaagaagaagagaatgtattttaagtgctccaatatatggtttgaagaccaacggatggacctaactaccaatgattcttctccgtttactggaattggccctctgatctgtttctaagtagtatttgctgaaagaacatgaatgcaacaaacacatttctttggagatattcttgagcccaggtgtgtcagtcaggcttctccagagaaatagaagctatatacacgtgtgtgtgcacatgtgtatgtatatgtgtgtgtgtacatgcatacatatatatacatacacacacatatacatatatacacacatatataaaggtttattagaaggaattggcacatgtgattgtgggggcactggcaagtctgaaatctatagggcagagcagcaagctagaaactctcaggcatgagttgaagctgcagtcttgaggcagaatttcttcttcctcaaagaaacctcagttttgcttttaaggcctttcaactgattggatgaggtccacctgtataccctccttttacttcaaggcaaatactggtagatgtagactgtacacctagatttgtgtttgattaaataagatgcatgctacagcctagccaaggtaatacataaaaccaacaatctcatcagtttgcctccgggatttgcctttccctcagcatctattctcccagtggacctaaatcagtgaggctcatctgcctgggtgagaagcgaaacatcaaggaatgattgagccagagcagaccctggaaaggatgtgcttagggaaattggagccaaaataactgaattgatttgcccaaggtcacatagctagttagatgggcaagcgtcttactgaatcaggaccacagtaggctcacctgccacgtgaaccaaccatttttgcctgcctgcctccaagtctaggcaaggtcctgtactacaggtgtgcagctgttacaaaccaaccctggttagtggacaactggtgggtgtatctcaggcactttgtgtttctgttatttggacccttctagagcgactgttgttcagcctgttagtaaaagcccccacaggataccaggcattgtgttggtgattgtcgtagtccattttttgctgctataacagaatacctgagagtgggtaatttataaataatagagccttatttggcttacagtggagaggctgagaagtccaagggcatggagccagcatctgttgagggctttcttactgcacccaaggaggaaaaacagaaggggacacaagtgcatgaggcagagagaaaaaaggggggcaaactcattctttttatcaggaacccactctcacgggaacattctaatgataacggcatcaatccattcaccatgacagacccctcatgacctaatcacctcttaaatgtcccatcccttaatatcacaatggcaattaaattttcagtatgagttttgaaggggacaaacattcaaaccacagcagtgatcaacaagtatttctgaacaaaaaacgactgtgagcatctcctgtgcgttattcaccttgggcgccctatcatttggcacagtgcctactacaatagaaatgctgacctgaaaggggtttcctagactgagaagcagtgggcaggcctcacccacaggtgggaagacaattggcaggacaaagcagtcacgtgtgaagcatgggcagtttgaaatctatatgcacccccgggatctctgtaaatcctctcagccactcgaggggatgtagccacctccatcttacagttgaagaacctaggacttggcaggagaagggatttgtccaaggtggctgggtccatggtgcgatctcgagtgatcgcaacacagtgccctgcctgctaagctccaccactctccggaacccccacgccttggagagaaacaaaggccagaggcctcaagcagtgtcagtggctggtacgtgtccctggccctttcaccaacaggcctccttgggaggacctctgtgggccagggaggagggtgagatggagggatgggctgcagccttatgtctcagcagaaggcccctttgacgggccagtggcctcactcctgggccacagcaggaagcctcctcccactgccccgaggctaggatcttcctcaagatcagcaggatgtctgctcctcaaggtccctcacgtgccagaaccacatcatggagcagctatgtctgtgaggcacagtccacgaagggagattccttctctctaaaggtcattgtccacaatagaacagttctgctcccgaaacctaccctcccaggacaggactttcactgtcatcctggccctcgtttgcccacttttccagccccctctcccttctgactccaaactccagaactttagagaaggaagtaatttggcctggactattattgaaagggaatgggggaaggggtcacaggctataaaagctcttctgcctccttcactctctcccaacagcaagggccggcagctcacttgacacacctgtcctccctgaaggacctgcccttcacattccggatgggctcagggcccctttacagccccactgccacagctgttgccactgacccgggcctgagtggggagagaccagagggaggaggcagccctatcgtcaggatagagggtgagaggagcccctgctggaaagagcagagatgaccttgtgttggaacaaagcacatccaaggatccgcacccccttgcccccgcccactccacccagggtctggggatggaattcctgggaggtacagagctcagattcagagatttgggttcgagccccagctccactctaccccagctgagactggacttctctgataaaaagccaacatacccacctcacaagcttcatgtacagccagtgctacttacaaatatacagtgtgccataagccaggagctggtcatccgtcaggcatggtttgcccaccctgggcctggtttctgggcagcatgacttgtgcagctgtagaggaagtggccaggagtagctcagagcccagcctgcccagcctccatccctccccacccatggactccccaggactcctccatgcagtttagggatcccaaccaatcccttcaatctgcagatgagaaaaccaaagcctggagctacccagatggtcctgggtacccagggcaacccagatggtcctgcccttgcccagcccagctgcagtttagaatggaaactcctggggggcagggatcatggctttgtctagcctggccccaagccccaggcctaccacagggcctggcaaatctccctgaataaatgaggtctgccaagatgccctgtgcatgaaagcatctctttaaatggagggtgaggggctggttgtgcaagcaccgcaaggagttcagggagtcgagaggcagaaccaagcactgaacagctgctttgtgtctgcagagaggacagcagcagtccttataatgtctgggaggcatgagggtttgtggggagctgggggtgacaaaggcagtgacatgggctgagccgccatccgctcacctcccccctgggctctggaggcccagtgtccagctgccacacaggcaggcacaccaatagcttggccaaaatgaagacatccagacacaagcctgcaccctcagagacggaatcctggctcttgctcctttaattaagaaaaacaaaagatatgagcagggtgagtttgcctcaaacatgctggggaggtacaaaggataggttcttggcttcctctaggagggctgtctgggaggaacacacgtggtggcttggctgtgcggtcactgagactgaggtcatgggttcacaccctacaaggtgtgggggaaagaatccaaatctcctatcccagactgaccccaatcatagactcagagtgatcctagttttctccagtcacccgcctcatccatgctgtctcttataaggacactggcaagaccgtgcagctgcattcactcaaccagggcttactgagcacctactatgtaccaagcttagtgcagaggacacagctgtgagcaatggaaacaccttgctctcacagcggctcacctcatcagcctttatccctgactcactcaccctggtcttttatttgtttctgtttgtctgtttttaatccttctgaaaacctattcccatctaccatcttgagacatgttttcaatagccaaaaatttacagatggaaaaagggcagcacagctaggacaagaatttggatctcccatcttgcagcaacacattgttcaagctctgtagcatgtgctgtgtggtcacaggctgcacaagagcactgaggccaggggccacagtggcgtgtggctgttggcaaggcaggcagaggtacttgcaacctcacatccactagcacatccaaatgcatctttgctgagtcctgagagaaatgtgagaagtcagagtcttcttgcagtcttgtacttatggacagagagaaagaacccacagactagacagaatccttaatctggtcggggaccatgggttggatttacctagacaggcaagaatggggagagtatcagaaggggggacctatgaagaccaaagatgccaaggaggagtgagtgagacaaaattgccagggtccatgaagggagccgagcaagaagagagcaggtgtggcttagagcacgggagttagatggatcagtctagctggatggggctgggagggccttggatcccaggctggggagttcacaccatggggagctgagtgccccaaagccagcctcctttctcctctggctgccatgtgggggcctcaggactgggtctggtaattgtgtgtgctatttggagttctcagcacctggcaagccaggctggcccccaacaaccaagaggtcaattggattggacttcagcgcctctaccacttgacagagtcgtgcccccaggcaagaaacaagatgacagattctctctgtgagatggggaccctagcatccacccctcactcacctgacccctcaggggcttagtgttttacaagaggatcccagagagaactactgatctcaaaatgacaaactgctatagtggacaccaagatactgtggttcccttcccctaaatctccagtgagcacctgctatgcatgaagtgtgcggcgcaggaacggggaggatacagaggggtcagctcagactgcagcttgcaagagcctggaagggagaggagggaacgtgtctggcctttaacacacagcccagcccgccgtgggagcagtcatcacccaccaaatgaagtagtgcaggaggaaatggtgggggaagcacacaaaaaaagcattctcaccaggaccgtgggttgtaagtgccacaggagaagtgcaacatgactgcaggagaaagtgagcctctgcctccctgtccactaaggctctgccagggagacagtgaacatggcatagacgaggtgacatggtgaggggatatgtagacagaaatagtggtcgaagcccaggaagatatgggaaacccatggccacgggccttggacagaatttgaaggttggcagtggacaggtgagacttggatctgcaggggtgggtggcagacttactctggggacagtgagtggaggccgggtggggggtggggggcgggtcttgggcatggcaggaaggctgtggagtgatggccaccagacaggcctgccagggagggagtgatgctggagcacccacacagcctagggcctaggaggtggccccagtggccactgcaagagcaggtcaggagctgccctggtctggggggagtgggtggctgacacttgcatcctggagacagcagactgctgggtgtggcaggcctccttctggacccttcagtcctcccaccttctcacccgtgtgacaccccccatgtctgcagtggagtggaggggtgctggggctgtcgtgggagggccctggcatcgccttatgaagacatctgtgtctctaatgaaaagttacccgttgccgggcaggggagagacacaaatcattaggaatcaatttagctctggccagccatctgcctgggcctcactttgggggagccggccgctgcctcatcacacgctccacctcccagcccagccaggaagcacgcgcggccagaaggaggcccggctgctggaccaagggcagctcacggcctgcctggtgcccgcatggtatgcccgtggacgccggccaggtctaaggtcacggcggctgcacgcgagcaggaggggagaagccgcccaattccgtcccccagcttcctgcctcccgccccgcgtccctctccctgctctgcgctgcccgcgccctccgccccgcccctcgcgcctgtccagagtgggaggtggcggctgccgagccatctctctggccatggtcacagctcggttgctatggaggccggaaccccgctgccccgcccccgtcgggccggtccccgagcatctgccgcgggcccctcccgcgggtctcggagcccagcgccgcccagaggaacgcgccagttgtcgcgcgcgccctgcggcccccgacaagctggcaatttgttgttgtttgtagagtgcttttgtcatgcaaatcccagagccgacctctggcgctccgctcggaggaggtggggtgtttttgccttttttttttttcccttagcctttgcagttggaattattggtgttgcttaaaattaaaaaaaaaaaaaaaagccgcgtaaaggaatatcacttaatttcatttgagtgtagcatttgtcgctgtcaagtgtgctccgcaccttcagagattgctcagattggggatgggttgttagttaaaaggtgaaggaatctgcctagatgggcacctgtcaccaagagagactcaggtaccggggctggagcaccaagtcccaactccaaaagccagccccacccagtgtagcccacacctcctctccccaccacatgcctctgtgggacttggtcccctcgggggatgtggggctgcaggctgctggcagagccctccctctgtgagcaatgagttccctgcaggactccaggcagcccaaacccagctttgcccacccagacctgggcccaagtgtccaaagggctgcttcttgaaaacctgagccaccccgtccacaagttcctgagcagcccctcctgagggtgaaagttgggccccagccagtgccctggagaacaacgaatgaatgacccctttgtgtaaatttaccccatgccctgtttccatggctctgagtggctttgagcaagtgccaggtacatcccatcaggaggtctgtatctggggtgggtcttccccactgggtgccaggccaagctgggcaccccttgaccaggaggtagcaggagggcatcagggtatccccgagaggaaccaagccatctcctcaagcctgtaccctgtccctgcaatccatgtgtgtgtccaacacaccgcagtccctgtgtctctctaacacaccgcagtccctgtgtctgtgcaacacactatgcctaggcatatgctggtgtcaggccccatgctgggcatggggcaccacagggaacagacaaaaataaaatctgcccccttggaatggaatgacatgggagaagggagataatctaccgataaacaatatcaatgtaggcgctgataagagctttgaagaggatgaagcagatgacgggggaaagggaaggggctgtttgagatgtggtgtcagggaagcccctactgaggtgactttgagctgagacctgagggaccactgaagcatgctcagtagcacaacaggctagtttctttctacaacaaacaaaatccatctgagtttgtgaattgcagaatgcttttttaagcatttgggtccaatgctttggggaccaggaattaaatggtctgctagggagtgctgccatactgcactaggtagcatctctactttgcttgtgggcacaaaggaacttcggaggtgaaggaaacagcctgttgttggagggaaggcagagcatggccttgcagtgagcgctgcctcttccccgctcctctcagctctgggtttctagttcatccgagtggtcagcggtcagatccagtgtgaggagcactaagcaagaggcttcaccacatcttctttcacaagctgtgcacctaaacatggagggttcaacagtgctttcgggggttgccccttatgcaaaacagatggcccagtgcaagcacagagcaacgcaagctaaaaatggggatggctgtgggtggctttcatggaggtaccctggggtgcaactaggtcttctctccgtgacggagcctgtcctagccccagctcaccagctcacagctcttccccagaactagcttgttcttgggggaaaacctttctttctcccacttcccccaccacagtgatgagcagatatgggtgtgtgaagctgagtcatcgtcacagaagtggaagggagcagaggctctcagcccccagggtctccctgaattcggttctggtgacccagttgcaggcattatggtttacccctctggttctcagccttgcacactaaaagccaccctgggaccaattgtgccttggatccaggctttcagggtggggtaagacaggcgaaactccgcagctgaaaacgcctggtgccgactgcctgctcctgtctgcgcagagcacactcactgcagcctctgagctgctcggagccttatcctagctgtgcctctcttgtgtcctgaatctccccccagacactcagtgtcctgccatctgcccttggtggcatcctctctgacaatcagaaaacaagctctatgcaaggccctgaggggattcaggcgagaattcactacgtggaccagccagcatttattgagcatggaccctgacctggtcgccatgccatgggtcaggacatcaagacaaccaagggaaggcatggtctgatgggggagatagacacatgaacagatcatggcaatgacagagacatggggtggagggtgcccagcccggaagacaggaccactccagcacaaagactgttcgaccacatgggaccttggcaagtgctaccttgagccaggagggcccagcctgcattcagacccagcagagcaggctgccactgctgcagagcttcagagagcagacagctgcttaggcaagggatgccagggtccattcctgcaggcacgggcaagggtgctgctccttagagaggggcagctttgccggggcatgtgtccatgtgtcctagatggttaagaaaaggtttggggtccctgaccctctgccccctcaggagacaaatatgaactaaaggcaggggcctttcaccaagaggcttctctccctgcctgcttcttatgcttgccacctgcaggttgtgatttagggacccctccccagggggtccatccctgtcctctcctccctacgtctcctgtctggtggcacctcaggccggccaaacgagaccagacatgactgaggcaggcagcctccacattcagggctgctgtgacagctgacaaagttacaaggacggggacaggagggaggacgggtggcccgctccctgcagcggctgcccctctgctccattccattaggattgatcaggctgggtcaggggtctgctgggcctgcaccgggcacctggagctttcacgatgactaatagcagtgctgccactgctgtgccggccagcagcactgccccccctccccgccccatcaccaccaccagccttcccgtccacccagctcttcagcaggtagtccaccttcaggtgccacccatgcttggctcttgttctggctgctgctttaatcatccacccattcactcagtcagccagtcagtaagtatttactgattactccccagagatttctgcccagccccctgcccccagcttaattctgctcaccagcactgttgccaagccccctccaccctagcacatgacaggtgctctcaccatcacctggacagtaggagtgccgcagtcaacaggccatgccttagccagccctgcatgcccagcagagggaaaaagaggagaaaatccagtaactgccctgaaagagctaccctccagccggagtgaggagacccacatgcacaaaactactaggaaatcccagccagggcatggccaagagatggccgaagtgacaggctgggggctgccacacgtggctcccagttctctcatccccagggctctgggagctgtcgggggcgtcctggaaccgagaggaagaatcaagtggagaaactgacacgacacgcagccacactccttcaggcgcctccataacccacgctgcaggctcccatgtggcgcacgctcatggacatatgccacctacagcatgtggggagggggcgtggacaaggtgtcctagaagccatcctggagctagcaggggcagaggggccatcccaacagggctggctggcagagagctgctgtgccttcactcctgggtgagacagaacaggctgaggccccaaaccctgcacagaagcaagcctggagccccagaatattccatgggcccatccctgaaggatctgtgcagcgtgagtgagcgtgaggagtccagactgcttcctgacagtgtccctgagtgagacagtcgtgcatgactctgtgcctgtgtgtgtttgtgaccagggtggattcactgtgcatggctttatgtgccagattcagtgtgggtgggggcagcattttgcggtatactggaggctgtgtctataaatttctgactgtgtgcacgctcacactcctgtacgtgtgacgctcagtgtgacagtgaggctgcagggagggcaggatgcggtgaccatcctcaggggtgtgtgtgggtgcacgggggagtggacatctgtcctgttttctatgcttcccacctcccccaagcatacccagaggtccagccatggtgagcagaccacagcccagcacccctcccacacacattttaatcaatttggtgctttcttgtcaagaagacaagctatttgcttcctgaagatcagatggtgatggatgaaatatagggaataattaaattagcagtgtaatggtggtgcaaggctcaattaaaaaaatatttccattgtcataaagtctagccataaattttaggagccctacattccggtggcctgcagtgcttggcagcccgactggctgccctgtgggtgtggactctgatctgatctagggaggcccagggaagggctgggctgcttgaaggagattggtatcagtaatttgaatgtctcaccatgccccacctggtccccatctcgtcacatctgagcaagacagcgacagcctgagagcagcctctggtgcctgctccatgtttcaggtgcatctccaactctcaaccatagtgacccctcatttcctctgtgtttcttctcactttaagccaaccatcaggaacttggggtgggggctaactcccaccctgtttcaccagggcaggaccccagtctgttcatgaggtgctgggtggtgcctccgagagccttcactggaagcctcagaaagagccatcaagaggtgcacaggagcacccaggaagtccctggtaactaaccgatggatgacatggcccaggtcacccttcagggcactgcaaaaggtctcctggacaagagggtccagggtgacaagggctgaggtgctccaggcagaagcagagggtgtcggggcttagactggaagggcatgctcgggaggcatcctcagcatgttctgtggaggctctgggaggccccctactcccatgtaagttggactttttggcttctccctccccaccgcacttattgcaataactacttctcgtatggcccattatgctaatgaatgacagcagcagacctagaagggtgtttgctgctgtcttgagctcattagtaaccgagaaatgcaacaggaaagctagagagggcatgacaccaggtttaaccagggccagggcaccactggccttggggagggagaggaggaagaggaggaggatgggagagactggaggaggaagacagagaagaaggagagagaaggaggggggaaaggaggagaaggaggagggaagggagggaagaggagaagcaaagggcagagggagacagaggaggagctgggaaaggaggaagcgtcagagtgcagtcagaggccacaggtggcctgtttggggagaagggacagtattccctaccccatctcttcacgcaatggtgcatgacttctggcaccattaggaccaagcctgacagatgtgctgagcttggcattgaagacctcagcctcacctttctttttccctttagagaagcccctctcacacctcaggtgatccctcctctctcccctcaatgaaacctgccccaaaggatttacccaaatcacactgcgctgtacagtaccctcccccctcccccaactcctgccttccaccgagtgtggcattaaagcagggacaatgacaataaaggccacagagggccacagaacctcatcagctggtgggaaggaggagggtctggatgaatactagggagaaagctggcttcccccagccccaggccaggtgagatgaggccctactttcctctgttctgatgagagagtgcagggggctccctgcccttggctccttcgccaggattggggatgctgtgggccagcaccaagatctactgggattacagctggaaggagcaaagggtcagactggaaagcaggacatgaagatctgctcaggatgctgcaaaacaaagtcccacccgcagaagggctgctagggtacaaggaaaaacctgcagcttcagccagccctggactcttccaccagcctcctgaggccagaaaaagccccagaccagagtcctcaactttacatcgagactctgggtttgtccaaaggagttggaagaagcaactgaattcagtcctctcggggtggagactggcaagccggactcagctgggcccagcacgaggtgggccctggatcctgaatctccaggattgaacaacagcctcccgtgagaagaggggcgctggaggtcaaggaagcagttggctgcgtgtggttctgggtatccaggcctcatcccaccaaggcagaagccagccagggtcccagggcaggttgtgagggccccttgctgctctgctggtttggggagggagcaaggcctggcccagaggcatgggttcagcttcaccatggggttcagttggcccagccccccactcgggatggccctggttgccgggaaaaggcagggaggaaggggcagcacaaagtaatgcccaggacaaggaaccaggggaacttgggggccatctgtctcttcttactgctagaatctgtaccatgggcaaggatcaaagcaaaagccccacatcctccactgaggccagccggggctggggagccgcctccacagcgcagcaggctcagccccgtgcgtgccgtctctctatcgccaagagagccccaggaccagtgagaggcacagtccatcatttctgcctgccagtggcttcttcttcaggtcactgagagagagtacaaacttgtcctacagaagacaataacacctttttaatgctaagagaattcacagagccccactctgtacataccctgaggtatgagaacaaagtgaagaggtgaacatgcagtcaagggcttcttctttgaaaccctagagaggaaactatttaggaaaagagagactatttaggaccataacagttaaagattattgagaaagggactgaattgtacctaggtgttttttctttataggcttgttttagaagactttccaatctcgtttaatggcaccatgttcaagttaatttaattcaatcaaaagttctattttgactttttctaaggataattagtggggaagcgtgtgttctcactctcagttaatggcaccatcatctagacagtctttgagtcagtacggctctccgcctcactctcctcattcccatcagctggttctccctcaagctggttctccctcaagctggcctctccacacagcactgccttcccgtctctccccacgaccgcaaggtatcctcgctcagcctcctaccactgtaagccaccactctcaccttatttcctccttacttacctcattctgatgttgccacctctgtaaaggcttcctcttcattgagttaattattcctttctctaagcttccagaacactgtttatttcaacacatcacataataattgtcatcctctttgtacatctgcaggtccacagagcagacattctttagggggacagcggggtatgtgcctggaatataagagtaggcaaattaaggtggcagaagagtgagaaaaatcaatacattcattcatcatctccaggtaatatgcccaaagcaaaaagaatataccaaggtagattccaccacctggtggccatatttagaattgcaagtttagtttatttggattaaattaattcttaaatctaaacttttgaagtttcaataaatgtcacacttgagcactatgagtgtagtatctgaaaataacagccttgtcatttcacagacttatatgaaggtaaaatgtgttaactgatgaaagtactttggaaaatcaataaatacatattgaaaatagtccacatgtggggtctctgccaggtactgtggagcagagagctcccatgtagatgggaaaacaggattcgcacttgaaaccactagagaaacaaaactgtaggtgtgtggcacaatatcatagaaaaagcattctggacaggaggtcagggagggctggctccatgcccaaggcagggtttgcagaatgaatcaggttagaataaagccagtaggcaagagggtattgtgggctgggggaggtggaggggaggggagacattggctcagttaactactggcctaattgactactgactaattgattaaccaggtggcatggacaagctaagatggggagaaactacagccagtagcaacccctacttcccttgacatgcctatcattgccaccaccacggcattaatctagttagaggtgatcacattttctttcttttctttctttcttttttttttttttttttgagatggagtcttgcactgttgcccaggctatagtgcagcagtttgatctccactcactgcaacctccgcctcccgagttcaagcgattcgagattctcctgcttcagcctccggagtagctgggattacaggcacatgccaccacacccggctaattttttatatttttggtagagatagggtttcaccatgttggccaggctggtctcgaactcctgacctcaagtgatccacccgcctcagcctcccaaagtgctgggattacaggcgtgagccaccacgcccagcctagtgatcacatttccttaacaaaaaaatcagacacacagcctgacaaatataagtgtgtatttatgaggacaaagggagaaaaggcttggaatgaggactgacccagcaaatcagagacgtatggttccgtactcattagtaagtttaatgagggatatgagtccactgaggagggcaggtggctctgggacaggcaggactggccacctcactgggtgacctgtgtgaagaatgggtcctggtccaagaaggagcagataaagcaggaggggctccttagccattctgctcatgagtaaaggagctcatgatggcaagtgggatgacagtagccactctggccagctgaagtgacccgtgatgttccccatttatttctcctaccaccttcactttgctctgcttcctgacaccaccaccctccataggctaaggcttctgcagagtccctttcctggcaaggctcccaacatggcccaggggacctccaggccagtgtcccaggcctgtgtctacattacattctgaacctgctgagtctcggtgctttccagttcctccgctgcaggctggcttcagtccctgcccgcccctgtctggacaagccacaggcccccaacagggcccctctacaccctgccccacctatgtgtcctccctcccctgtcctcatccccagtccctctgcctccctccctagagcggaggccggcctgaagacagatattaatgtgcaaattagcacaacccgactgggtccagattgccacttagaatttgcatattaataaatgtttttgtgacagcatttagcagctcaggaaggacagagtgtctcccctcccccagccccataaatgagataacaagcctggggaagccaaatttgtccccctcccactagccaacctgtacgacttcctctcgtcaatcaatcaatccatgtatctatctctctgtcacccccgcattgagcgtctctgcccagtctcccaattagccatgcaggaggcaggacaagctcagcaccgtggggagcagtggaggagccgtcagtgcagcagggtgtctggaaggaggaggaagaaccagcctccacgcaccgccccccaccccctcaccgccacaacccacagggcagacatggtggatttagggagaattcctgcttttccaatcgctgagggtctgccgccttcctagccagcaaggagaggagctcaggagttggcagggtccctggactagcccaccagagccctggccctgtggctggtcccagttgtaacttgtacaagacacagcacccctttgggtctctatttcctcttctgtaaaatagggttaatacccgacttccctgcctcacaagactatcatgggaatcaaacgagatgtggacgtgcttggaaaagaaaggagtggtttacagatgccacatggcatttggcatgggaggaaaaattcctggggctgcatattacagacttctgtattatacatgaaccatctggaaattaagtattatgtataacagagttttcagctggctgaggattgcctccttcaagcatcaaaacttttaaactttcattttaactgcttgaaggaaacatccttctaaaatgcaccccaagctctcggtttccttattcagtataaaaccaagttttcctcctgcccccagtttgtctccatgcagggtggcgctgtcaggatgcccaggacagggacagggccatttcctgctgcagcaccacccacgtctccctgctaccttcctgagcctcctgcttcacccagtggccgctgctctgcctggtctgccaggcctcagcctttctcagcgcctcctggcctgtatgattaaatcagtggctgggtacagtggctcatgcctataagtaattccagcactttgcaaggccagaggatggcttgagcccaggagttgaagactagcctggacaacatagtgagatcctatctctacaaaaaataatacatacatacatacatacatacatacatacatgtatgtactattacatacataatattgttatgtatataataaaattgttagagctggcaaatcagctctaacgatgggaactggaatgaccaggccacccaggagtaggagtgggccacactctatccagggtcagggtcagggcgcttacatttctgtggaggggggcaggtgagcagcttgtcaacattgtttgtaaactggcagttaatagccctagagtgggctttctatgagcaaagtgcacaagagttttaatacacggactgtaaatattttacgtttgttgaatcaatgaagggattaataaaccctaagggccttcatgacctacttctcagttctgtgttcatttgtgttctagagaaaaaggcagcctgcttgctagttttgttctggatagaaaaggcatgactcaggcatgtgtgtacacatgcacccatgtgtgaattcaccacctttgcctggtgaaaggggtaaacaggggctctggaagcagtgggccagcaggtctgcattctccagtgcccaggatacatggtgaagagggaggagcccctggtctgggatcatcgtacctaagacagagcctggtttggttatggacctgctgtgtgtgtgtcaggagggcaggtctgaacctctctggacctgtgtttcccattctctgaaagagctcctgctaagagaggcagagaaggagagtggttagaacatgctcaagagccaaactgcacatgctgactgctgatgccagctctgtgggcctgggctagctgcctatcctctctgtgcctcagcttttccatctgtaaaatgggatggtaacattccctgcctcatagtgaagtggaattctgtcaacagaagtcaagcacttagaacagtcagtgccagcacatgataagctctaagtaaatgtttgctgtttttacttttgctttaacttccctaccaggtcaatttaaggaccaccaggtttaacataaagagtgagcctttaactctagttacaactttcaggccaccttcccagtccaaggctcctcctcccaggcctagagcacatgaaggccccctttacaatccctgggttgtgtcttcttccctgcttggctccactgggcccatcagtaaatattcagtaagacttgccagtggtaaagcactcagggtgagactgggaccgcacaggaacttgctaggaattctcatagatgcaggtagtgggccaagccagagggagagctggggctgacaggaatctgagccttgacccagagggcagcagtgaggcatggaggtctccttagtcagcaaagcagctaaagacatccttcaatcacagtctaaaaactccagcatccgagtcctggcctgggtagtgggaaagatgaggacaaatagagaaaaccatccctgccatcagagagaccccattcaaatgggggttttgcctcctctatctcccattctaaaggaatgttcatgtgaaggagtgttcagtccctaccctagggtgcctgcaaggctcccacctcaaggagcttcctgccttccagagcccccatataatgtgatacaagcatcagcattctgggagttcagaactcagagccagggggcctaagtcaagcagaaacagaacatgagggcctcctccattgccctttagagcccaacttagagagtacctcctacaggaagccttgtctgattttgtgacataattgcctaatagattgcttacattctttactcctacctggcctcctgcagtctacgactagaccttattccagtactagtgtacggcctggcatcaagcatgcccttgatacttattgttgagtggatgaatggtaggtggatggatggatggatggatggatggatggatggatggatgatggtggatggctgatggtagatggagggatgatggatgtatgcatagaggaatggatggatggatggtagatgatggatgatagaggaatggatagatggatggatggtggatggttgatgaatggatacataaggatatatggtgggtagatgatggatgcatggatagaggaattcatggatgaatggaggaataggtggatggatggatgaatgatggatactggattgattgatagatggatggatggataaatggatggaggaaaggatagaaggatagatgatggatggatggatggatggatggatggattcatggagaaatggatagaaggagagatgttgaatggatggatggatggatgactggatggataaatggatagaggaatggatagaagactagatgatggatggatggatggatgactaaatcaggggatggatggatagatggatggatggataaatggatgaagaaatgaatagatggatgaatggtggatgaatggatggatggatagatggataaataaatggatggaagaatggatagatggatggagaatggatggatgatgaatggtggatggatgctggattaataatggatgctaggtggaagaatgactgatggtttacttgtagatgggtggcaggagtaccagaggccagagtacagagaaggacgtgagtgggcaattgggcaaagacatgagaatgggtttgggaggagtagttgggagagagagcttgaacatagaccttcaacctgaggcataggagagaagactcagcaccacataagcactggggaagtttccccagagggacagtgacagataaagtggggagttgggggagtggtgcttgtcaagaagtgggagggatggcagctggtccaagagggaggtgagagcaggtgaacttctctctgcatctgagaaatcacaacagcattgggagtgccagcctggcaccagtaattcaaccttgggttcaaatcaaatacaggacaactggacgggagagtggaggcaccagccacaagctgaaagggcctggctctggttcagtgaagaacatggacagaaggtctggtcctgaacacatgagtccctgaaacccatccaccctctgagtggaagggtgggtctaagggtgaggaaccccggagcaggaaagcatcttggcctccctcactgaggttccctgaatatcagatgtttaatccacccctctgcctctctccaacaccatgctccatgcacacaaaatggggagctggagggagagcaggagtgtgtcaccagatctctcaagcactctcaggagaacctctccagctctgctcatgtttcagcacaagcagtaagtcctgccctgagtctgacctttattcctcttggtgcatttgtgagcaaggaagcagagggagcccagtttgaggtcccaaaagacagttctcagaatttcttagaatttttctaggctagggagatatcaaaggatttctctggcttccatgggaccccagatcttgctggcatatacaggagcaaaggatagtacctttttttttttttttttttttttttgcttatggcctcttatttgtgatgccagagctggccattatgaaggtgattaaatttaaagacactgcagtaaactccagcctacaaaaggcagccagcatcattaacacgtaattggaagctaagcttaatgaggtaagagagaaaaaaataatactcccaatcccttttaggatggcagcccacctgagcttccacactagcacctcaatagcatacccacgccagggccaaaggggaaaaacagagtgaagacagcctctgccttagggagtttactgtttatccctgctctcatccaatcctccattcaactaagtgtttcacagcacccactaggtgcctgcctaggccaggccccgggggaggcaggtgaacaactggatgaggccccagacaccttgctaaggtctgcagggaggctcatctcctagcctaagcaggacaagcagtgcaagcccccaggtgaggaagagccagcagcatggtcagacacagacaggaagaccagggagggtgggagctcctgggagaccttctggtgaaggggatgtatcagccttgcagagaacaaaaggctggttgataccatgaaattagatgctcagggatgctggctggctggagcccagcccggccttcctgccccctcccatgctgccccatccatgctgtccccagggcctgcttttgactcgtggggcagtgcacccccacagctactccttcctctgtgagcctgggcaagccccactctggttgcacatgagccaatcagctcagaccggctttcccagcatttgtgggttttaataagaccctaaaaaataaaagcatggcttacccccaagtgctctttccctttaatttggggtttctaatatatatgtgtttatttcatggcaatgaatgcttccacgggacttgcctgtcgctagtgttgtctgatttatttcctctcgacgctctaagaaggatgcggttgttaataacaataatgccgcccatcttacagcactctctgcttttcggggcattttaaaatccattatcctatttaatagaattgtagactcacagggaaattgtaaagtcgggggaatttgtccttggccacccctatggccctctctgtgcctgccccctccctgggctccctggcctcccttctgtgggggtggcccagccctgcggagccactgtcgggccataccccacctcctgcgacccaagcaacaagcaaggggtggcagagaaagcaccttccgctcctggggtgggcgtggggcgagcagtcctctcgtagcctctgtccagggagtgctgctctccagaggaggggtccaccatggggaaagaactggggagagggtcaacctgtgggcaaggtgagtgggagctgctctctttcgtgtcttacagtgaggaccaggggtgtgactatcttcccctacccagcacgaggctcctggaagcccagccagctctgacgtaggggcgcagggaggaggagaaggtccccgctggactcaggacctctgctttccactgccttagaggttctctcctgttgcctcctctgtggctctcctgttccccctagtcccccatctccttctgagagcactgcctatcttccctttccgcccttgcccttccatatcccagaaacccactttcctccagtggcatcagccctgccccagaacgaatgcatccttcccagcagggtccaaggggaaccaagcacactctagagaagggtcctgcctctgaccccaaccccaaaggcagagttcgacttgagtaactcaagacatgtccccaggaacacacccgtcttcctgaaagcccagtcgcaagctcctggtcagaagccagatctgtgcgcattcatttcatgttctccatgttctctcatcaccgtgttcccagcttccctctcatttctaagcctcaggaacgacccctcagctggcactagcccagcctgccctgcatctggggccagagcattacagtcacccagggagctcgtgagaagcatcccatgcctgggtcccacagactggtctggttggatttgtctgggaagggggattttcttccttctgtttcttttttcttgtttttccttgaagctcccaggaggttctaaaatgcagccagggttggactccactgaggcagttttttgggacatgtagacctcagggtcctgcagaagcaggaggccgtcctcaggcagtcttaccaggcagtggacagcccctgcacctgccagccctgctccaccagcccaaccactgccttcctgcatctcaggatgcctttgtttccctggccgctcccttctcccttttttctcctcacatctcctttttctctctctccttctccatttctttccacttttgtcttgccttttctcttccttttttatttctcctccttgctttagttatcttcctctgtcctccctcctccacctccccttcccctctcccctccaccctcccctgtgcccactcccccatccctggatgctccctgctgtgccccctgctgaaagcagactcattattaacccaggtgtacccagaggtagggaggggctctcctctgctctgctttcaaattgagcagagcttctctaacagagcacattgcagaattcatccactagcatgaactgaactccagtttacgatcccaacccttgccaggccagaggaaaacaggacctaccctcccttgcaccctgaaaggtgagcctggcaagcactgcaggctgcattgtgggggccccagggccttgcctattttccaccaaggtgaggccagaccccaagattcctgcgttcacccagagccccacactcctgaggatgatggattatggcagaacagaaatggaggggggccttcctggggttctctcaagcccccagcactgcagacacggaagccttgaaggccagaggaagactgagctaggaccagaagagtaggggagcacacccaggagagagcagaattgcagaagaaagcaagaggtgggaatggatgcagggtttgcaggggcagagaagtggcctggctgggctgcagtgtcccggctagggagagaagaacaccaagccaggcaggggcttggagcggattacagaagcctcatgtgccaggagggaggactaagcttgatctcctgggggataggaagccagaggaaggtagttggcctcttgaaaggtagatggcccaaaagggacatggcctgaagaggtgggaggctgccatttgggaaagggctggccaggcactgcccttattgagaaagggtgagggctggtcaggaagaaagaaggtgaaggcagcctgggatggatacttccagtgccctcctcattaagaagcctggctctgctcctgacaaacctgcccaggagcctgtgctcagtaaaagaaattgattactttccattgcaattaacatctggtcccgggtcacatcgttaggataatttgttacaggaaaagcaaaggaactagttacccagtaataaagttcttgtggacccaattaaaaaggcctcctccagcccatggggaggggctggaatggggaaggctccccaggccagggtctgggaccggggaggacggagagggcagtcattagaagtagatgcttgggggtggaagagtagaggagttggctgtagccctaaaggagttggctgtaggccggctgcatcccacacactcaggcctcgagctcccagaggccaggtgggcagtggtacaggatactggtaggagccagggctctagctcagactcagtttcacatcctgcctctgccatctagggaagcctcttccttctctgggcctcagtttccctctctgcagtctggaaatattaagtttccatctcacaggggtggggagggttaagtaagctatagggaccaagctctttggacagcatcagcatcggaggtcaggaaaagctgactttggtggggtggttcaggcatttatcccatgccagtggggggctccctaggatgtgtccctgcccccttgctgaaggaaccagccctgaaggccctgtggtgacctagctgctgccctggtactggccccgagagccgtccagccggcgtcatcgcttacttcctttggtgttcttcaaccccatcactgagcacttttgtaaatgcccccctcccaacacacaaagttacctttgcaattcatttgtttgccaggcaggcagatttatggcaggtatctgtataaatatttatactctgcggcaaggaggttttggaggacgcatgagcacacacacatgcacccacgggctctcatgcccccaccccaacctagacacagcttcccctgcctaggccagctgcagccaatggaaaagtgattctcaccctatacacacacccaacctgaggacacacatcacaggccagacaggccgacacaccacaggcagaccgcacgacacagacagaaacacactcatgcacacaccatgctccaactgcaagagtgcctgctcacctgggccctgtcccagtattggccctgaactacatgacctcataacctcctcccaccatttagaggattggaggatggggctgcagctcaaagaggcagggccactggctgggagtaggaagccggtaagaagcagaggggagatttgaactcagtgctgggtaaggacaatgcttatccactctgtgcctcccttccatgggagaaggaaccgggcaagaagggacacgatggtcttcctaaggcttttccatcagagactgactcagaacaatgcccccacgtcttccagagtgcctgggagtgctcaccctctgtacacatggtggccagaccaggggagcccctgcttctgcacactggcatgtcattgtcagtctgcatattgtcattgtcaatatgcagacctggccacccacaacaggcagtgagcctctcagttgccagtgaagttacggatcagagaggagtgggctcctcaggaggcttccagaagggtagggaatatggatgttccagccccagctgtggaagttcggagccggatgtcagagtggagatgagctgcatgagcccctgcaccaggcagtgaggaccgccctgtgcactggcaaagggcagcacagaccccaaactcgctgggtgcagggctcaaagcctcacctcctgattctacaaattagtcacattgaggcttcaaagggctgaactaaggaagggtgcatggtgaggtggagagtgaagaggtggggacctgcggggaacttctctgcccaagctgggtctgggacacagtagccacctgtgatctcagtggctgggcggtggggtagccacctttctggcatgtgaattgctgtggatttcggtaaaatgcccactccagtgcatctctcacctcctacattatccttcggatttttcatttggtgagagctgatgtatggtgactcctcactccccaatatcattattcgattaaagcacatctttgagccagcaactgtagatcatctggctgctgggagtccgcaggcagcttgacagaggctgtggcattgggaatgggtcctgtacctgcccacctgggcctctcacgtgcctagtgggagcactcccacgagggacccccatcctctgcacattgctggcatgatgccctgcctggacagcctccctggaccctccccaggctgctttccagcccctcccactgttagagtctgaaacctggcagggaggttttgggacagagcccactctagacctggctcgctctgggcacattaccgaccctccctgtgccagtttcttaatctgtaaaatgcaggtcctaaatgctcctctcacatgactggggtgaagatcaagtggaaatacacacacccgctggtcatcactgatgctaaccatcaccattgccattagcatgttctttgttccaacaaagttccccagggagcagaggctctgtcctgaccatgcccagtgccccaccgtccagggtctcaggtagtgatgggccaggatgggctgtttgtggtcaagtcaggtaggttgtataagagcctggtcgtcccctccacatctgaaatcagaagggcagggctctgggcacatggctgcgcctgtgagacaccctcagtcgagaccagcttgctgatgccctgattgatgggaaccagcagtgagaaagggccagtcttcacctggctcacattggagctggcagtggcatgcaacagagagtagagtcagtggccccagctctgccaccactcaccagggcggcgtccactccagcctcagtctctctggcttgccttggtgtctcatctgtaacatgggaatcaccttttccctgcatgtcttcctggcttgttgtgagatgtaagtggagttaccaggtaaagggagtgtaagggtgtcggttgttgaatggagtcttcttggctgaaatctttaatgattggggctcttgtccctcccctggcatattcctcaccccagccctcaacaggtcacactaattcacatgctaaggcaggaccctgccccacccagagaacatccttctctttttttttttcaggttaataagtaaaaattattttatttcattaaaaataatcagtatcttatctggagactgggtaattattaaacatatacccagttgagtctcataagtaatagcaagtcatttaaatctatgctgtgtttgtttataaatggttgtttccattgaaaatatatggttatttttttcattgtgatttcttgtttttttattattatactttaagttctagggtacatgtgcacaacatgcaggtttgttacatatgtatacatgtgccattttggtgtgctgtacccattaacttgtcgtttacattaggtatttctcttaatgctatccttcccgcctccaccccatcccacgacaggccccggtgtgtgatgttccctgccctgtgtccaagtgttctcattgttcaattcctacctatgagtgagaacatacggtgtttggttttctgtccttgcgatagtttgctcagaatgatggtttccagcttcatccatgtccctacaaaggacatgaactcagcctttgttatggctgcatagtattccatggtgtatatgtgccacattttcttaatccagtctatcattggtggacatttgggttggttccaagtctttgctattgtgaatagtgccgcaataaacatacgtgtgcacgtgtctttataggagcatgatttataatcctttgggtatatacccagtagtgggatggctgggtcaaatggtatttctagttctagatccttgaggaatctccacactgtcttccacaatggttgaactagtttacactcccaccaacaatgtaaaagtagaacatcattctctttctaaggctcggttgtctatgttattgttcttacaagctccaactgcacattgaaaagaaaccatgcacacattaagaagagtgtactcagagctgctgaactgcatgcattcccaggcttgtcatgtggcctttctggcccaagaaccttgttcttcctgggcccctgagtcaggcataagcctcagtcacccttgataccatccccagggcctgggcactgcttaatgactgccccaagccctctctggctgtttttattccatcctgggccagccctgtggtcacattcacaggggtagccaagggccttgattgccccctcccagctcctggtggcaagaccatgcctcttctctccctttctcaacaacgaatcaagaaagcctacactaggagcctggcattgctcaaagggcttctctagaagcagatcatgagaagccccactcttcagtctgaggacatctctggaaaggagggatctttctatcaggagaggagctgctacattcctgcagagaaggcgctgggcaagatggccacaaagggctcatttctcctcgagagtccttgcacatcccctgaggccaggatccctgggcttctggccagttattggtcctaaggacccacagagcaccctggggccttggccacctgtgaactgctccagggctggcactatgaatttttcagcttggtcctgccataatccacattatcaatgacttggctaaagataatgttggttagattgactgaatcttcagatgacttaaagctgagaaaaatggtgcatcccttagatggcagaaaaacagtgcaacgagatcttagcagatggacgtgatgggtagaatccaacaagacgtagttcaatagggagaaatatggggtctttctaaggctcggggctgaggatctaagtacagaggcagggacaggcgaagaacacagctgctgtgcccacgggcaagtgcttctcctgacagctcaataggaggctccagcagcatttggctgccccggatggaattgcacttgagactgcttgaagacacgtgtgacatccaggaggaggtgtcagtcacagtctgctctttgctgtttcaaccagttctgggaataattgaagaactgggtaaaaattacacaaaaactaagttcagaggagagtggttagcacgctgaaggattttacatgattgacacgtgacatttggtcacagagccagcattgtgaagctgagcagggccaactgcgaaaagggtcactccagggtggtcctaaggaaaaggcttgtttctggggctcgaaaagacaacaggagggccacctgcggaaagtacaagcagtcagattttaggcaaacattaaaagcatgctacttttcattgctgtgcaaggagtatgtggccactctcgtggggttagatcatcataggcagataaactggatgcctcaaagcaggggtcactaagtgggactgttgtcaggatgtagggaggctggatggcctcaaagttcccttgtagagacatctgggttctgtgattcctactgggtctggagaaatgcagggcacctccagcctgccataccccttctaagtgtaatgattccagtaacacccaagaccaaggtgggaagagtggagccctccatttccgagcagtagaatggatctatgagtaacgtaagcctggggaaatggcccccaaccaggcagccatcctctcctccttcccctcgggctcgggaaagcaggacaactagtccctcaggaggcataaaaggacactaaggccagagaacctttctgggataggacctattggattggaagctgggaacagtctgagggtctcttgcttgctggatttctctgtccctgtccctgtggtttcaggctgtaggtacctctgcttcagaggaatactaggctgaggcaagccagaggactaggctgggctctgaggagagggagcaaaggcttttgcagtgtcagctcagcagaggtgaagaggggcgtttcggctttctgcagtttgcacagcccaaggccccagagccaggaggagacaggcacagctctcatgcagaaggcacagtgcatgggcacatttcctgggcaatatctcttgggatctgttgtgctggctgggcacagagagtatgaacacagagatgagcgtatggcctggcctggctggaacagaaagtgaatggtgttagagacagcagtgattctacgagagtcactgggatcaactgtgaattccagtccataggatttaaagttaattctttggcactgggaagccatagcatgtctttgagctgttgagtggtggagtcaagtgtaggtgtagccctataagcaacgagggcagagatggtgaaactagagaggaaggagcaatcccagagtgtctaaagaattgtaaaattatttcaatgtgcctggcccttaagtatacgaggagagggtgtggacaggatgctgttgaggtttcagaaaacccaggagcaatccttacatccctcacccacctgggcaaaggtgacatttggtccccagagccactcataggttcctccaaagacccagagagccaatcctctagaagatactgtagccacagtgaattgggggcaaggaggcacctggaggcaatgactgggagagggtttgggtcccagtagaccctgagagagagcccagcctcccgctgcccacccccccaccatacactgcagtgttctgggagagatagttataggtttacatgttcgggtgttgggagccccatggtggaggctgcagatacggaaaggaaaaagagttttggccttttggctaatgggagggcctgggggcaggaggtttccatctccctggggaagcatctcaaaatgaaccttattcaggcttgttccttcctcccctccccattctggaatccaccttagagctgcccaagcaagcactcagcccccaggaggccgatcccccggaggtttgcagtgcgcatgtggtcatgtgtgcaggcttgtatgcaccaggaccacacatctcccccaaacagggatgcccaggtgttcacccaggtcttcatgtttgcacacaaatggtgcatgcccacctgcaccgccacaggcacagactgtacaggtgtgcatgggcagctcactggtgtgcacacggggctgttccatagggacacaggctagacagacctgggctcattcactcgtgtggaaggggaggaggatgctgtagctgcctgctccttgcacgctgaggtgaccccaaaccctggggtcaggcaggaaaaatgactttgctggctgaaagtgacagaggctcactgccaacacagagaaggaggaagtttatggcagaaaattggatttgaaatcagaccaggcccctgggaagaggttcagtcagagacagcagcagacaagacgggacaggaccttggcatgggcagtgggaggggaggccagccaggaaccaagcgggagggagacagtgccctccctacccctccctggggagccatcaggcccctgctgtgtacatcattgtggggaggatcaaggcggagggctgacaggcaacaagggctgaagagaattccccctgagttgtggtctagagtagggagacgggcagggaggagggaaggatggggctgaagagggagatggggtcagatggcagattcctccacattgtgctcagaggaaaccaaagcctcacaaagttgggctggggggcaggggaaggctgagttctcgcccgaaggattgatgaatacttgaatgaatgcctgtatcctgggacatatatagtgtcaccatgcccaggtctcctccacagatggagtcactgagacccaaatgacccacaggctgtgttcaggtcggtgctggaacctggctctttatacccagggctggttcccctcccacctccctgggctgcaccgcaccatgccgcctcctctcagcaagcccaccctccccctgactctgctggaagatgggctgggtgtggggggtgttaacacagccaaacaattaactggaatcgcacaaaggaaaggtggggagagggacactcttggcaacgcagcagcgttaggagagatggatgaactttcccacttcaccggcgccacggagctgacagtaaatatcagaagtaatgatattgactttaaggtattatggttccaaatgtcacttgtgctttcgttctctttctctcttttaagaaaaaaaaaaaagaaagaaaagaaaaaaacacagtctccccgacctgatttgcatttttccttcctctgttcctctgttcctacacctgggaaggtagagaccatcctgcacattgcaccttccgggcacccaacaccagatctcattaggaaattcagccgtggccttcctgtcctttttgtcccaagcatcttatgcaggacaagaaaggccttcccagagcatcctttccctctgtcctccccatccccacccctgccccagctcaggaacccactgctgcctcccagggctgggagaatcaagcagagactcaggagcccacagctcctggccccaaacgaactgtctccagtgacatctccccactcccccgtgtctgcctccagtctggctgctccatccttcccaccccctctctttgactaacactgtttcctttctgtccacctgctccatgctctccaactctctcgtcacacctcctccaggtagccaccaccaccatcaccaccaccaccacaacctgagccctagctcctcctcttcctcctgcaaacaccttagcacattaaccctgcaatgccccctcctcaggtgcatgctggccgcatagcttgccaagtttcttctcccagatctcacctctgaagccaggttaaggcttctgggatgccagcctccccagtctcccactccttttcaagatgatcccacagagcttggctttttcaatggtgttttctgtaaatacctcttaaatgagaaaccaagaaggggccacccagaagaggagctccatggggcacgggtagatgggtggaagcagagagaagtgaagagggtgggatgggagtggagggctccacccagacagggaggctctggatgtagtgggaaaaatagaagcgtggaatttagacaggtctgggattcaaatccaggtgttctgtgaccccaaggatgctacttaccctctccaagcccagtcttcttgtcttccaatgatagtggcgatgcctccctccctgaccctccttgcctaatggagatcaggggcttctcatacagatgagaaactccaccttctcccaggctccatctccatgggaaccaagcctcaggtcctactgagcagggagaggaccagacaagggccccaaaccggagtgtggggaagaatggggtctgagtcgggcacactgcagcccctgcacctcccctgaccggatgagccacccacctctcagcctcagtgctttgcttgcaaaaatggaataggagccatctagtgggacttgtgtgaggttcggagttggcaagtggagatgagaagtgagggcctggacacaggagagctgacatctgggtgtgacttgagtgtctttgtggatgttacacataactacagtgacagtgaagacctggccacactgctgctctgtgctatagcagctttctgggtctgcgctatagcttttccagccccagccctaccctgttgagtgcctcgagatctggtttggggaagcagagaccatcctcctcagcatggtgtacacagagaagaacatggtggtagataccgcttctcctttgtgaacatctccagtgacagagatcatggccttttcaagatgctgtattccatggtcagtcttaaaagctagaaagttcttccttaggctgacctaaagcctgcctccctctaaattcctactgaaacttccaggtcatgttcacacaaagggtcaatagggggcccttgttcctgatcactcaattgattatttgggcccataggcaggattttactattgtaaagtatgaacactatgtccatattgtactatgtccatcatctttcaagagttgatctggtgtccggctgttgccttagttttaaatttgccccatcccaggccgggtgcggtggttcacacctgtaatcccagcactttgggaggccaaggcgggcggatcacctgaggtcaggagttcgagaccagtctgaccaacatggtgaaacctggtctctactaaaaatacaaaaattagccgagtgtggcggtggatgcctgtaatcccaaccactcaggaggttgaggcaggagaatcgcttgaacccaggaggcagaagttgcagtgagccgagatagcatgattgcactccagcctgggtgacagaacaagactccatctcaaaaaaaaaaaaaaaaaaaaaattgccccatccgccttcagggatctgtgaagaaattctctcctctgcctcatccaggtcccaccccagcccttggctcctagcctcaattcacagggggtgggcgacatgcttctcccttcgaatgaggtttcattatgttcactccatcgggcttggtagaagggtattcagaaagggctcaatcaactctccattgcccaactttgagggtgcttgagacccacactgctatcttctgtgggctactctcctgctcaagaatctgcagctgctgcctgttgtctttgtgttgagccttcaaagcccttggtattctagccttactcttcctctccctttaaagtcccttttgctcagcatccaccccttacttcagtaaaatcattctctgctgttgcccatcctatcctataaatcattctcccagcaacctctcccatcattgctatcttcccaaatcttcctcctcctttaagacccagccagattctcaccaccccaggagacttcttgtaactgccctggtccctgctgaccttccgtctctcctacctcctctagcacccgttgtctgcccgtcttgagctccatagtcactgctacagccttccctgaccctccttccagtctacagagggcagaggttctgtcttctgttctttctattttcccataccccatcactgaactgcatagaaatcattcatatttagctttggaataccttatgatgagagcatttgagtatggttctacttataagcagtctgtttctcttcctaattctcagttctttaggactaaccagaaaagactgggcaaatcctctccatggactgagcagacacctgggcctggtggatagtatgcactgctgagttcggggtccccagggagatggagccccaagagaaaccccatccaggctcatgattgcagaccacagccatgcctctagaccacagcctggagcctggagccccagtgctggatcctcaaattactgtcttgggatccttgtgttccatgctgtcttcctcagccctggcctgagtgcctgacattccagcatgtgttctagagcccaggctgggaatggggccaattcctgaagtggctgccagggagaagtgaaaggacacttgtcatttctcctgccccggggaaaggaccttgggttgagaaacagcaaaaaccaagaacattatgtctgtaaagaagctggtggtaaggggagaggagagacgggtgcaggaaggagggaaggaggccagcaagggaaggggcacatgcacccactgactgctccccaagcctaagtgcaaacagaagctcccatcgtgcctcattggaaatcccctggaaacattcccatttaaaggaatctgaggacaaggtattgcatagaacaaagacctccaccaggcaaagaggctgtgcccctatccctttttcaggcctctcctcagagggcccctgggtcttagaagcaataggttcctggagacacagtgacagatgtggtccccacctgtcagtccacaccactagccgcctcactgcagacagatgggtgcatcaaggaccaggcagaggaggccagagagtacccagggtcctgagcataagacaggggctggagtggggcagagaaaggcacagatgtgggagggaggggcacgtgcataaaggggaccaggcactgtccagggggcgtgcacaaagattcagcccactgcaggatagcaagctcagagcctgcatcccagttatgaagaagccatgctaaataacatgccttgattaaccaaggatcattcaggtcactgaaaacccataccctatgacaccaaaatcttaccattctttctatcatcctcctgtaagtaaggtggctggcagccaacaagttctacttctactagcataactctctggtaacgtctgccacctgccacccctcattgtgtcccgattttgtgtgctaggaccacacagcatcaatagagttagaattctgcctaaagtaagagttgtaaggctctaagagaaggcctgagaagtctctcacgtgaagaatgtttgtacttattttcatcatgttcattttggatacctggaaaaatgtttcctcctttcctatttgttgtttgtgtcctggtaggtgataaatttctgtacatgaaaatattgccttgatgggaagttctcttcctttgtcgggaggctactaatgggatttttttgagcatgaaagcctactcagcacctcctaacctcccccaccctcgtcccctccccacacagcccccaagaccctcccagcagaccctgtagtgcaccaggagggtctttgctctggtggctgctcagccaggctcctggggtgaattctcttcaggggtgtgcccaagacagagagggagaagagagagtgggagaaatgagtttcagggagaatcagagaagaaaagcaaggaagaaaccagaagaatctagagagaccctactgtgtgccagggtccttcctgttatctcctgaggggcctgagagggaatagcatctctctggtccagacctagaagctgcccgaaccaacacctgaccacctgacccctgaactgaggtgtgcaaacgtgtagagcagatttgtcagaatgagatgtgagggaggccctggaaggcagcagatcagcagggagagccgaggtgagagcaggtgactggcaagagagggagagaaaggccacagttgacacaggatggggaggaaggttcagagttcagcgcgggcagggcagggcagccagcgggtgccccagtggcctgttcgagctagggtacccatggagaagtccagagcaagcctgctccccaggctgcagcagccccgtgaccctccctgtgtcctggcagaagggtgcccagcccggcagagtctgcactgtgctctctgaccacacccagcccgtgccccagccccccaaccctgtcctcgtcccgctttgtcctaggagccccacagccggccagccccatgcctggagctaacagggctgcagaatcgccaatcccagaagagatggggctgcctcccaggcttggccttgaccttcggctgccgccggggagtgatgcgtccgcaaccctgacttgattaacatttaaatgccatttggtaagaggaggaggaggagcggggctggaacaaacaaacctcagagctagagctggagctggagctggagctaattactggttagggcacctgggctgaggagcctgcacctcagacgccaagttgaagatctgtacttgtccctgggggtcagggtgactgcagggctggggatgtggccaggcctcctcccctcatctgccctgggccctttgctcatttcaccaagactgagggacagcctccatcagcacgggccggaccccaggacccaggtgaaggggaccacagggctcctctgaccgtccgcttcccactccagcagcctcttggcctggcctcagtgcccctgggtaccctctgaagcttcttttggtcttccctcctgcctttctcttcccggtgctctcaagcgctgggaaggaatcccccgcccccctccctaatgcctccccagcaggggctgccactagaatggctctaatgggccaggttgctcccccggctgggcatctccgagggtagtcttcccaatgaggctggagcaaaggctttaaaagccacttaaaacatccttgatgagcaggagtgaccccttaggagggaaagaggcgggaataaagctgaagggagctgcagggctagtccgcttccccacctccacacttgggtggggcccaggcactgctccaggccacaccctggagctgagtaggggtgcaactgtaaacgaggcagctaattttgttaacagccaagactctcgatttgcatattcaggaggagtgctgcctttggaagtcgttaacacaaaagtctaaataacttcgctaatggggcagctgcatgcggttaccccaggcttgccagcctggccagcctgccaaaccccaccccagcttccctggaggaacaggaacccgtcaggcagctggatgcattggacgagagctacggttagctggtgagccacaggcacaaccaaaaaccccatttagcgactttaatcctggtgcgtctttaactctccacacccaagtttagctcttggtttaactctgccctttgggttgatatgtttgctgagccagatccagggcagaaaatgcaacacttgcaaagatcaacacccttgtggaaaccctaaagtacctgtacaaatgacaactggctttcctgtatgaatggccttcacaagcagaattgtcaaggcttaatgtatgtccagcattgctgggggccccaacatgagtggggaggggcatggctgctaaaagtaactagagtttaatgaacacctactgtgggccatacctgtgctaggtcttgttttataacatgtgccttccttgatcctgacaaccccacaaagacaaagataacaggctcatatgtaaataaaccccactttggagacccagcaagggtgagggattttgtcgcaatcacatagctccacgcattagaactgagattcagtaatgggcgtgtctggctacaaatcccaagcagttccccctctgtcccactggtggtcctcctgaactcacccacacatctgcagatgcctgtacagaacccaaatatcaagccagcagaggagccttccctgcccagaagaagcctgcaggcatgaagagtatagccctgcaacgagactgcctgcctccagacaggctctgagcagaccagtgcatagcttcggacaagtgatttcacctatctgggcctctgtttcctcatctgtcctcattttggggatgatttcagtagtactgccctgcttgtcatgtgaagggcgagaagggagcttggcacacagtaagtgctcactcgtgttattaactggggatccccccactcaggggtccacttgaagggctctgcagaaggccttgctcacaggttgtgctcagcaggctggttcctgtgcagccggtgggtgccagtgtcaggggaggtccctggcccagcagtgataaagtggtgcttgcccagagccctcaggtctctggggccctctgagactccatccctggatcagatgtttagtgtccatggtggtggtggccagagattgcaaagaggacttcagcaggcaaagctgagcaaccagaaacaggcagctgcaggttaaaaggcaacaaatgcccggcatggtggctcatgcctgcaatcccagcactttgggaggccgaggcgggtggattgcctgaggtcaggagttcgagaccagtctggccaacatggtgaaaccctgtctctactaaaaatacaaaaaaatttagctgggcatggtagtgtatgcctgtaatcccagctacttgggaggctgaagcaggggaattgcttgaactggggaagtggaggttgcagtgagccgagattgctccactgcactccagcctgggcaacagagcaagcaagattccatctccagaaaaaaaaaagaaagcccaggcatggtgactcatgcctgtaatcccagcactttaggaggctgaggtgggcggaccacgaggtcaggagattgagaccatcctggctaacagggtgaaaccctttctctactaaaaatacaaaaattagctgggcatgttggcacgtgcctgtagtcccagctacttaggaggctgagacaggagaatggcaacaacttcccgagcacagagggctcatgcttataattccagcactctgggaggccaaggcatgaggatcgtttgaggccaggagtctaggagtgtaagaccagcctaggcaacatagcgagaccctgtctctacaaaatattaaaaattagccaggcctggtggtgcgcagcccagctatttgggaggctgtggagggaggatcatttgagtctaggagtttgagactacagtgagctataatcccgccactgcactccagcctgggtgacagagtgagacccttaaaaaataaataactaaaaaggcaacaaatgatggctctgctggaatccagatggcccagcactgctcagctccacacccagaggtgaccactgaccagcccttctttggcacctctgagatcctctcacatgggctgagtcttcagggtgcctgacctgccttttgcttattcctttgccaggctcccttgtcgcccttcacatgacatcaccctttcacttacttgacaggtttgtgttttgttttgttttgttttgttttttttggagacagtcttgctgtgtcgcccaggctggagtacagtggggcgatcttggctcactacaacctccacctcctgagttcaagcaattctgcctcagcctcccaagtagctgggattacaggtacatgctaccatgccagctaatttttgtatttttagtagagatggggtttcaccatgttggccaggctggtctcgaactcctgacctcatgatccacctacctcagcttcccgaagtgctaggattacaggcatgaaccaccatgcccagcctcttgacaggtctttgctgaactcctactctgtgtcaggccacagggaacaagttcggcacactgtgtgccctcttggagcctgcagtcctgcaacctgagggagggactacagcctacgcgctttcatgcatgcgcctgcatcctgctcctgtgccaaccttgagcaaagattcacagcgaggtgtaaagcacctggactaattcaggagaacacaaacaggtcagggtggccttgtcttgggggtacctgcctccctgccagccttccccagccccctacctatccatgtcctgctgtagccatattgcacacaatgtcttatcctctgtattagtccgttttcacgctgctgataaagagacatctgagcctgggcaatttacaaaggaaagtataatggagcactcacagttccacgtggctggggaagcctcacaatcatggcggaaggcaaggcgaagcaagtcacatcttttgcggatggcagcaggcaaagagagagctgtgcagaaaaactcccgtttttaaaactgccagatcttgtgagacttactcactatcatgagaacagcacaggaatgacttgcccccatgattcaattacctcccaccgggtccctcccacaacatgtgggaattcaaggtgagatttgggtggggacacagccaaaccatatcattccaccccggcccctcccaaatcttaggtcctcacatttcaaaaccgatcatgtcttcccaacagtcccccaaagtcttaactcatttcagcattaactcaaaagcccacagtccagagtctcacctgagacaaggcaagtccctttcgcctgtgagcctgtaaaatcaaaggcaagctagctacttcctaaatacagtgggggtacaggcgctgggtagatacagccattccaaatgggagaaattggccaaaacaaaagtgctaaaggccccacacaagtccgaaatccagtgggacagtcaaatcttagagctccaaaatgatcgcctttgactccatgtctcacatccaggtcatgctgatgcaagaggtaggtttccatggtcttgggcagctccacccctgtggctttgcagggtacagcctcccttccagctgctttcacaggctggtgttgagtgtctgtggcttttccaggcacactatgcaagctgttggtggatctacctttctggggtctggaagatagtggccttcttctcacagcttcactaggcagtgccccagtagggattctctgtggaggctccgactccacatttcccttctgcactgccctagcagaggttctccatgaggaccccatccctacagcaaacttccgcctgggcatccacgcgtttccatacatcttctgaaatctaggcagaggtttccaaacctcaattcttgacttctgtgtactcacaggctcagcaccacgtggaagctccaaggcttgaggtttgcaccctctgaagccacagcccgagctctacgctggcccctttcagccccagctggagcagctaggatgcagggtggggacacagccaaaccatatcatcctccttgccttttcgcttgctgttccctctacctggaatgttctcagaccttcacaggcctgcgggctccaagctcaaacctcagctcctctgggaactttctctgatgctgctagaccctcttccaagtctcccactgggctttgtacaaacctatgtagtccccatgggcatttcaggctaaaaggcatgggtgtgacccagtgaagcgagtggtggaacctggggcaggtggatgaatgggtaggagaggggctggaggcagcttgggcctgggatcctgcaaaaggggcagagtacaggcctctgggagaggaagagtgtaggaaaaagtcccaggggaggctgcagagaagtgtggggcatggacacctgaggctaagcaaggtgccgagtgcctggcataaacccaggctgccggtagagagatctgggtcagggtcagagagaccaaggtcagaaggcagcctagctgaggactcaggcaagttactgaagctcgctgcatgccatgtgcctttcctttaatagcttttgggattattgagaggatgtggccaaaagcagatgtcaagcatagccactgccagcccaggagggccccttcgttgatgttggtccctgcaaacactggggtcctcctagtgcccagggacctgaatccacttctccctctttactctctgcacctctgacctccccagcacctctaacctccccagcacctctggccttcccagcaccaatggccttcccagcacctctgaccttcccagcacctttgaccttcccagcacctctggcctttccagcacctctttcatgtccttgtctctttctgggctgccattccacacccaaccgttctctctttcttttctgccccccacccttttgtcactctcccttcaattactgtaacacagaatagaagaatattttatttggtgtctttattaaatcaagttttatgttcactgtttttcattttaaaagcggatgagtgccacatactattttttcttattaaaaagcaaaaactcaactaagtggctttgatggccccatggtggttctgtccattggtcagtggttcctaatagaaaatggaaaggtgtgggtattctccttggccactggactgtcacctgaatcagaaaataaacggcctcagtgcacccatactaccatttccagagagaccctggggccaggccagggctgggctgggctgggctgtgctgggctgagtgcctgtggctgacgaagacagactgcagtgatggctcagaacagatgcctccagggcattccgaggccccatctcatgtaggtatccccactgcagctccctagcagaggcctgctgagtcttggctcctggctggtttgactccaaagggcagtggcacagagcccagggaagccagttttggaggtatggctgagtaaaggtctcagaaaccacctcctccagggagactgcctggcctggtcacccactcttcatcatggcactctctctcttcaggtctgtgttttctttcttttgttttttggagaggtggggtggtggggatggagtctcactctgtcgcccaggctggagtacagtggtgtgatctcggctcactgcaacctctgcttcccgggttcaagcgattctcctgcctcagcctcccgtgtagctgggattacaggtatgcacccctgcgcccagctaatttttgtgtttttagtagagacagggcttctccatgttggccaggctggtctcaaactcctgacctcaagtgatccacctgcctcagcctcccaaagttctgggattacagacgttagccactgcaccaggccaggtctgttttcagtttaaagtttatagctttccatgttacaccacatgtacctgcacacacagagatatacactcaataccacatgcattcctggacataatcaggcaatctcatcttctcaaacatattcacatgtgcacacactcacagatgtacagacatcagtaacaaggagcacattcacagacacaactctatgtcctgtatgtgcacaccttacatccccaagcaggctcacactgtctctctcccagagtcacatacagattccatcgtgtctagacacaaaatcaagcatttgcaggcacaggaacacaaatgcacatgcgtgtacacatatacacacatgcacatatgcacagtaggcacacacgtgatcaacttcataccctcagagccctgctctcaatgtctggagaaagagctgctgaaaaccaaaggcttcttccttatggaaatatctctctccataggcagaggcctcactgaggcctaagtgctacttccctggctcccaccacaaaccagaattaccaaaatgatctgaacagcagggtgagcatttagaacttttgcaaacaggttcatcaatggctccttgcggggcaggaaggctggagagaaggcatggtgggaaggcctagagggcccttttcctcctgaagtcccccatcctgggcctctgctcaccccagagtgcacccacctctcctgcaagccacagtgtaaggagtcaggggagcagaagccaacgtggcaccaccccaaccccaaagggctccaattttagagcctggtcccaaattcaaaagcgtttgctgagagaatacatttttacctacctacgggaaccagaatgttttcaagttcacatttgtatgcagccgagcatgggtctgtggaagaaattccttggccttgtactcacagaggtggctctcagttctcccaggcaccccagattgggacagaaaagcccaggccctctgcgccccccaccagtccccacaatcagaagcatgggcttcatttcccccagcaatgaacttggaggtctgacagcactggagcaaggctgagcttgttttcccttactctgcatggccctggaaggtcactcacctagacttagtttggccatctgtaaaatggggataacggtgcttcctcatgcagctgttgggaagggaagtgagctcctggcacactccctagaacacagcaggtgctcagcatagttcacttcctcccctaagggcccaagtcctaagggaaaaaagtaaaaactcacatctccggctctgacctttgtcctaagaactggtccccccacaggccaggcgcagtggctcacacctgtaatcccagcactttgggaggccgaggcgggcagatcacgaagtcaggagatagagaccatcctggctaacacagtgaaacaccgtctctactaaaaatacaaaaaattagctgggcgtgtggtgagtgcctgtagtcccagctacttgggaggctgaggcaggaggatggcgggaacccaggaggtggagctggcagtgagccgagatcacgccactgcactctagcctgggtgactccatctcaaaaaaaaaaaaaaaaagaaagaactgccccccccgcccccaccagcccactggtctctttggcatttctacctgaagtctgggcagggttaaaggtaaactcatcattccccctcatccccagtcccccacctttcccccagccccacctaacatccttattactgtcaaaagcatcactgtcatggaatcttcaagtccccttgaacggctcctggtctctcctgcttgctgacccaagtccccacagttcttcccccatgccctattgctgccagctgcctccaagccctttgcaggatgttccaattggttctcccagctccacaccaacctccccttcccccacatccactgctctcctcagcacccaagccatcacctcagacccttccacaggggccagccccgtcactccattgctgacccctgggattgctgaatctggcctcactggaaagtttaactataaaaccatatgcccagttgagcttacccctggtccctaagccccccaagaaagggtcttttatgtatatatatatatatatttttttttttttttgagatggagtctcactctgttgcccaggctggagtgcagtggcgcaatctcggctcactgcaacctccgcctcccgggttcaagcaattctcctgcctcagcctcccaagtagctgggactgcaggcacgtgccatcacacccggctaattttttgtatttttagtagagacagggtttcaccgtgttagccaggatggtctcgatctcctgacttcctgatctgcccaccttggcctcccaaagtgctgggattacaggcatgagctaccgcgcccggccaagaaagggttcttgttctcccagcctctggtgcattcgggcaccaatggcaaggcgctgttccaccccgtcccactctgcaccttggtgtctgtctccccagattcacagctgcctcctctcagctgagtcctggcatctctacctgggagactttcctgcctaaattccccatccacctccaagtggcagctttcatcccccgcttccaatgctgacctccagattctgacctaatttggtggctgagaatagtgatgaagggaacaccagctctagggccaggctgcctggaatccaaagcagatacttaaaatttttttttttatttttaatttttttttttagaggcagggtctcattctgtggttcaggttggagtgccatggtgcaatcatagctcactgcagtctcgaactcctggcctcaagggatcctccagcctggctaattattttttatagagactgggtctcactatattgcccaggctggtcttgaattcccgggctcaagtgatcctcccgcctcaccctcccaaagtgtcgagattacaggcatcagccacaacatgcagcaatacatttcccttctgcaggctggggaggaggtaacattgaggacaaatgtagtgtgtgtaagctctcacggctgtgccagcatgaactgacagccatcatagtccccttgcttggtggcttgcactgatgttctcctcctggccttgcccagaaggagggacacctgcaaaggtgtggtctgggcttctgcccttgcacacccaggataaaaattcccagttttcagaataacaagatgtttaagatggaagggaggaggatgttggcagcaccacattgcatgcatccctcgtttaaactgtgattgtggaccaaacatttagagacccatgtactcagacagacttcactatgctaacttcatctgctggccactcccttggctgcctagagctgcttcccctgagtagtgaaaaatattcttgaaagctgtgtttctgggccaggttcggtggtggctcacgcctgtaatcccagcactttgggagactgtggtgggcagatcacttgaggccccaggagtatgagaccagcctcgctaagatggcaaaatcctgtctctactaaaaatacaaaaaacattagcagggcgtggtggcgtgcacctgtggtcccagctactcaagaggctgaggcaggagaattgcttgaacctgggaggtggaggctgcagtgagccaagatcgcaccactgcactccagcctgggcgatagagtgagaccctgtctcaaaaaaaaaaaaaaaaagaagaagaagaaaaagaaaagaaaaaagaaagctgaaaactgtgtttctggacactggctcaaaattgaatataatatcaaagtaaaaccagccctttcatatcaaaggcaacctggcaattagagttgaggacacagatgaccagtgggaaacctgggcagtaggttcagggcaggtagagtcattctggtatacgttgggcccgtgggcctgaacaggcacgcaggaggagaggggagaggcatcgtttcttggagaggaggccacatgtacataatgtgtatgaatgtatataataatcattagcagcgattcagctgtctgctgctggtatgcaagataaattgcattaatcaacacgatgccttcagaacttttggcgagtcgtttcttttgctaattgggccacttaaactagactgtcattgcaccaggatctccggctgtcaagacaattactggcatgtgcaagcccctcccttccagcccccctctcccccaccagcacctttgcgtttttaaatgtaatattaatgagaagagctatactaattacctggccaaaaataaaaccctgaaagaaggggggaggtgggtagggatgtgaccgacagggagacttgggtaaccttgaaggcagtatgagaagctctctgagtgggggctccccagagacccaagactggcccaggccagagctccaggcctgctccccagctgttgtggaatcctgaccatgccctctcctcttggtgaccctcaggacttcaggccagatgcaccatgagccctggaactggggatcccagaatcctggggtcttaagtgagataagcctgtagtcccaccatcagacatttggagcctgctagactcggagagataaagggacccttgcgaggtcatctgattttagactcatttcccaaagagaccagcagaataatccactgatcagtaaagccaagttcagattgcctagctcagtaaaacagagcaaccccaccttggtggcctcgggaaatttcagaaaggggaggttaggggtctgtttgaaggtgggtcctgcaatgtgcagtattgattgggatcggacaggctctgtgacataatcctttagaaactggtagacagagcaaggccagggttgagcaggtgaggatgagtaaacagccattcacaggccagcagatttgtccgggtgagtgagctgttgtcctgagaagaggagcgcgcgtggtctattactcagaaatttggattttcaggaagttcttggaacaaagttatttgcatcttttgcttcctggatgagaatgttctggatagtcaagtcatgttcacgtagaaagtcttggtcgtcatatgttaagctgtgtgctgcaggcagtttgctaaagtgtctgcatttgtcagaggagaatggggctctgttcccatcgtgtgcctgtccctggttgctgaaggcccctcatccacctcactggacataaaattctatggattcttgctcctctatctgtcccaggcatgtccctctcccaaattgcactgccacagcctgcttcgggtcctccctgcctgcttatctctcctcctcctggaggctgccagtgtttactaaaaagcaaacccagtcacgtcgcatgtgatcgaggggccaccgcttgcctctcccctcacccatcccttgccctgtgaactctggccggctccccttttcagtgcagcccctcacctttcactccacttaccacaggtcctctgtctctgagcctttgcacctgctgtcctgctgcccgaatgcccttctcagcctcgtgctgctggaaaactcctgtttgtccttcaggaatcaactgcaccagccaccctagagcacatccttggtcactcacagctctgtggttccgatgggctggcccacgctgctgtctgggtcttagctcacctgcattattggtttacaggtagaacctgtgtcttattcagatacaccctagcgcttggcacaggggctgcctgtccttcatgcacaataagtgctttggagtaaatgagtgtgtcttttccattgccttctgaataaaaaaagaaatgattctttaggcctgccataatctgtcctgctttaatttaagcctattgtgtcatctcctggttccctccttcctccctaaacccgctacagaaagaatccagccacggtagggaaggcatcgcatctccaggctgataggcccctccagggcctctgacttggacaaggaagtttccagtttctccccccaacgtgtccctcttctttgagagcctaaacagatacccacagataggagggacatcctggtggctatccttgatgcgagttcaggttgggagggcagggcccacctcagaaaactgggaactgccgaaaccgcctgcgctatctctgagtttccgaacactgtttccatgaagtgtgagttaccttcaaactgtgtccagcacctccccctgcttcatccctgacttttcccagggctctctccaggccccatggatgtgctgccgttgcaccctgcgatctccagctcattccacctttggagagttgcattcatcagcaaagcaggcaaggtcaggggccagtttgatcagcctgcagcctctcccaaaccccctggaggcatgagagaggggagagagaccccccagtgcagctcccctgggggagtctctaagcagccccagggtggccttgagtgactgcttcttcctctcccctctcctagaagcagaggatgggctgggccttgccttggggagtgtgtgataataaaagctcctggaagaaaaggaggaaaggaggtgtgagaaagtaatggaggagtgaggagaccaggaatgacccccgatgggttttgttgttgttgttgttgttgttttggaggatagaaaccgcaaaagccaagaccaggaggagggaattttgctcccatccccccaccgtcccaccccacctcactgctccaagactttcaaggccatggtcctgtcccttgctctccaaatccaggcagatagaaaatggaagatcccacttgagcccctggccccagaggctgtgtcatagagaagcagggttgtggagcagatggtccgtgcccggaagcgcctgatgtgatgtgggatggacaggaccgggggtgcattcacatccctggccggagggaggaaggcttcagtgggcaaaaaaggaagggaccaaagaagcccttctttctgggtaagctgggagtgctctggcccaggaggcttttcaggggcctagtgtgtgcgtgtagctcctgagcctcacctcaccacgtgaagggcatttgaccctgcttagcaggtggggaaattgtggctaagaggggtcaaatagtaactgatctctgtgctctttccaaaaggctgtttagagaaggaggcgcaagagagaagagcaaaatgcagaggtagacaaaggcagagacggaactggggatgcagggcacagggccaggcgggcaggagaccagaggcccggcctggaggagggtcagttgctgacctcaggcaccaggcccacccataaccacctgcttgtgtttctcagggtgggaattgagccacctggttggccccttctgagctgggaacgtgggaggtatctctctcgaagaagaaaataaaggggagccctctgggaggcccatcttggattgagccttaatccaaggacacaggccacagcagccaggtcagcagggccaaaccaagcccgtcctcttcctccctgcagggggcttctggcctctcacctgctgcaaccccctgtgtggtgtgggacttgccccctgtgtacccaagtccttgggtaccctggatttggcacccctctacttggctcctcctgccagggtgcccaggggcaggtttggggctggcttgatgcccgcagacatgtgctcaggagaaagggaagtgaggggcagagctgtgaaggaacctccagcagagggtgtgcggccgccctgggtccttcatgcaggtgacgacctgccccgaactagagaggtaggaagggacctgagtggctgtgaggcagggcctctctgggacactttccagaataaaagcagactcaggcacagagagccaagtgtaggggtgggggatgggcctgcaaaccccttagtaataaatgaataattggcccagggttcccctgattgagggacacggcttcatgtcagcatctcccacacaagggcctcggatgaatcttcccttcgtggccactgtcaccaaccaacttgggcgtggcgtggggggtggcagggagaccttggagactccctgtgcacccctcctccacgctctggggctccccattctcttcctggtcaagtttacagacagacttcccaccctcagggtcatctgaggtattggccattgtctgttcagacttcgctcttgtgagcttgggcctttctcctccaacaccctccatcagcaggtccaggaggctccctctccaaggcacctcccagacccacccactgtccctcccccttcagccttggcatatgagccctcactctcccactccccttcttcccctcctccctgttctcagaggctcaggtcagccagtcccttctccagatccaccaaagataccccgtccaccactccccaatgctgctggaagacagacaccctgggatgggatcatggggccgctgacttcctcatcccagcggtagcatgagacatgctgcccccatggctgccccaggcttcctccctcctgccaggctctgccaatcccccagggcttctgcacaagcagctgccattgcccaaaccccttccacctactcctccccaaactgactccaatcccgagcctcgccctcaataaccactcctctgcgatgcttcctccaactgcccatttaactgggcacccctttcttctctgccctggttccagcagcactttcctaactgaacatggctcatgtacctgccccccacctcctggcgtgtcttcatccacacaaagaacccgactaggtggtccatccatatctggtatgtactaggtgcttgctgaaccccagtcgcagaatgactaaaacaagtcaattctaggataccagctctgcaactggcaaacctgccctgcctctgtcacactctgcattcattccccacttctcccctggagcctagagctcttttttccccctgggctccctacagaggctccttccctgtgacctatagcattctgggtatgtcccctcccaagggatatgcacattggaggggaccagtgactcatccactaaagtgatgccggaatgcagctgcactagacattggggcaggccagttggaggaggtgggggcaggcactgttcttgacatagggagccctcatcctccagcagacatagaaggaggctgcaggctggtccctgctccacactacagaaatggcctctgtggcggaccagcaggacaggcacagcacggttctccccaggagggcgccatttggagtaatcagttttttaattactagtaattaagtatatgtaacctgcccagctgccactccaggaaatgggacagaactcctgggggctccgggggccaggcatgcactgggagcctcagagcccattcagccacctcagcactgaagagggtgggtaggtgggtggttttgggagtgctaaggtatgcaggagagacccaggagactggagagacctcagcctcagggtaggctgtgcctttctatatcaggggtccccagcctccctggggcctgtttccattctcccttcagcctagagcagcaggacacctgctcaaaaggttcttgaggtggggttcccaaccagcagcttcctcccccagagcctcccaggccttcagccactccaaaggagtcctccactgaattccccaggctgccactccacccataggaaagtctgccccaccccaccccaaagcactcagttcattttaatgtctactgagcatctaccatgtgctggttgctgcaaccgaggtctctaaggccatgcagccatcccttaggggagcctgtgtcccccaccccacccccgacacccaaagctcacagagaggctggctgtgcccagggcccagctcttggctgctggtcttaccctctgttctgccctctccctgcccctctctccacttcgtctctctcccactcctccaccttatgatgctgtcttgcatttagggtcttttgcggaacaattaaaatgagtgaagggaaccttcttgctttcttgcagttcttctttggggaatgggctggtgtgggtagcccctgctgagatgacacctggcctaacctaacgatcctttaattaaacccatccttataggagctctgtacaccagtcctggggactccagcccctccagagacagagcctcccgaggcacccaaacttttctgtccgcctccacagccattctccaattctccaccccagcacattctacatcctgcaaacatggacttgggtcatctctggacaaacaggaagtgggttctggcaggtggagcagaactgggggctacaggcattgatgggatcagggagggcacactcccctcttagagtctgcaaaaagggcaaggattttcatgtgcatctctagggggatgaaatccaggatgctgcaaggccaccagcaagctgggctgccagggcgtgtcccctccccttgcagccgttcccgtcatctgtcaaacaggaatggtgacagcttctgtcttcaggttcacgagcgtctgcatgcctctgaaaaccctctgccaacatgtaacatggggttagtgcatggatagcaagacatgatgaaaaatacagaaagctgtgcacatatgcatggtgactctggctccttttaactccaagggaacaagctttcatggctcacaccagagcctttcctcacctcggcaaagaccagttcttccagagtctacctgtagtttctcttgctatagccaaggtataatgctacctttcaatacttcctagaaagcaaatggcttaactttggattttaaaacccagggagccactgtactcactgttacttctttctcccctgaccccctgtctctgccccgtggcaccccagtgctgtggcaatgcctgccaaatttccagggagtcacttgttctctgtttcacgggttgttctgtgtttcacgggttgcttgccatgtgtaagccacgtctgtcctcagcacttgctctctggaccccatggggcaggtcagtggggaaatgtgctcctcaatgatctggtttttacctggtgttactgtggatgcccagccccatcctaccctgcagaactcaacctctcgaggaaggctcctgaatgagccacatcaagccagcagtggatgaacagtgtggagctgacagtcctaggcaatgggtgatcagaaaaggagcaaaatgggggtaaaaggttgatgctaagagatctaatgggcttcctggagaaggggcttcttagacagaagtctctgaaaaatggggaggagtttggttgcagagagaccattcctggcaaagggaacagccagggtgaaggagggagggaagaaccagccgtggtgaggggtaccagagagttggaagtggacagcctgataggagtgaaaggtgagggtttgggagtggggagtctggatggggtctgctgcagcacatgtgcacacttgtctgcacacgtattcttagagagccaaggttcgcagggcacggaacacgagcagcatccagctgtcatggcaaggaggaggatgcagcatgcccagactggccactctgaatacacgcacaggtgcccagcttgcagtcaggcagtcccttcctgcactcctacatatacacacgcacccccacatatacacacgcaaccccacatatacacacatatgcaccacatataccaggggtgggatgggaggtggggaggctgaacacaaagccgagcctggccggcaacccttagactgcacccggctgccatctggtggctgtatgcagctctgcgccctctaagatttcaggattttggagcctttgggatgtcacacccagaagtggcatccccctccccaccccgtgtctacacacacacacacacacacacacacacacacacacacacacacacagaatcaacacccattctcaacacaatggcccacacccaaatgcacacagggcctcacaacaaaactgctgcaaacacagggacacagacgcagtcattcccatgcacacttcttttctacctcttctcaccaactaaaattcagaaagtaagggtagaagacactgctgctagcccagcacaggcataagcacagcaagcttccctgtgtttccagaggccttggtctgttcttagcacaccagcgattctcacctgtggtcacacggtgcacacccttccagctcccacatctacctgccgcccacacgtttcatttccaggatctcctccttcagtgtaaggacgggaatggctcagtgggcaactcccagtgggggtcatgttcccacagacacccacatgccatggggaccgccagggacatgacataggggttgggggggacaccacccacagaatccttcacgctgcaacccagggggcttccttgcactaatgggagtggtgagattcaactttttttgcattagtttttgtcccatgtagctcacaacacatctttatctacattagctcaatatggattattatttcccccattctttcccacatggaggcatggaggttcagggaggttaactggcctagggtcacacagctaagagatgcctgcaggaacccaggctcccccactctgcttggaccctggcctgcactccctggggagacctgaggcccagtggagctgtttccagtctgggatgaggaaggggcacagctgcagagcacaggggagggtggtgcccactcctcactcctgccctccactgcctctcagaggcctctcaccctccgaggcaggcccccttccccaccaggctgcagcatcaggaaacagaacatggggtcactttttctgagcccggctctcagactgttccacccttgcactctccaggcctaacctgctcagagaaggttgctatctttatggggccctagggactgctggcaggaacagaaaactggggaggaggtggagaggctgccatgtgcccagcgtgtgtgtgtgtgtgtgtgtgtgtgtgtgtgtgcatgtgctgttatctttccccaatctgaattcctatgtggatacaaaatggccacagccctaccaggacacaattgccagggatggctctaagagaccaagttaaggggctggtggagaagaaaaggttgtgtgtggcaccaaggatgagctccactgttctcctgtcctccacctgagaggagattgggacacacacacacgcacacacacaacaccaagcaccacagacatgcaacctgcagacatccatttacagatagatcacaaacaaggagagtaagcgagtcttagcaaggagacccagatgagtcagagagttgtgggattaatcaggagagacttcctggaggaggaagatcttcagcctaatggcatcagggatccattagaacgataagtgcctgctgtgaggcaagcattgttggattgaaaccttcaccatcctagctcctaggagcacttccttttgtcatcatacactcctagagtcaaaaggaacctaagtggtcactggcccaactccaccccaggcagggtcccctctggagcatgctggacagcagcccataggttctgctggatagagcacagtcatggggcagaggacactctgagcttccaggcagcctgtgcccatgttggaccaggagttcctgcgtgaactgtctgcaacgtcctgaccccagagccaggtggaaagcccttatgccctccactcactgccttccagtgggatgcccctgcacctgctcaggctgagtggccccagtctcctttaaccctcctcatgtaaggtgaacatacttctcctgtgtctgaacacgctgcatattttgacctaaatgccacatccccatgtgggctgtggcccagaccactcccactgtcagcagcacatcgcatgctgagctagctgcccagtgtgggcactttcctcccagtctgcccctctgggatcccagggctgctgattacacagaccagagcccaacctgctgtcccctccaaggccccctgggaggacacacagccacacccatggagcctggttattcaaaccatgatgaatccatttcctgcacatggtagccaaatcctgccctgaaacctcacttcctatctaagtgccctactgaatcctcactggggagtctgagtggttggtgcccttccctgctcaccaaggtggttcttttcaccatccctactttaagcaattattctaaagaagagaagttaggcatttcctgtatgaatggctggggactgaacagtggaagctacaagtggctcagacgttagcttgatatcactgaaacaatgtcgaatagatgaaaacagctgactcatgcgtggagtgagcctccagtcagcagaggcattcaaaccagggttgcctgtgagatgctgccagtagcttgtgcctggtaggattagagcccttgcatcttctctgtgtctgtgattcactgtcattgtcaactacatcagcatggacacgttcttcaaaaataagacttctttagttgtgactatctgagaaaacccaacacacctctgctcagggatctcaggctggccgcccctggtgtagaagacagaaagcccactgaccactggggtccaccctcaggcctgtgggactgggagacgagagggaactcagcccaggaatggttgttgagtgaatgaatgaacaagagaattaatgaatgatcagccacaagaccatgtccccactgaagcttcttcctgtcccaggctcatccccaattcagagaacctacaggctccccttggactcccccactgtattaagacccagcccaggaccttgtgaggagcactgtcatgttggtctgggtaccccagtgacattatcacctgctggaggagccccaactcagtcagggctgagcccagcccagctggcaaaggcacaaggctgagagctcggagagccactaaccagcttctcactctcacttaacgtggcatttctgaggtcaggatgggtgccccagcctggttgttggctgcacttcggcaagatttcctgaggctggggttggtaggaaaatgtgtgcggacattttcctatcagtgccccccaggctgggcattgtggtgggagtcaggaaagggggagaccccatttcaatcacatgacaatggaagctgctgaggctgttaaggaggaaagggcttaacgcagccgtgctaataaggattaatgcgctgatggcaggtggggtgcactctatgggggaaacagccggacacacagaaccccaagtcactggcaatcccaaggctgggagtggctgcaccttgggaagttcagcgcctaccctctccccttgcctttgccccctgcccccctctgctatgtgttcattcattggcaggggcatgaccatgcgtctacacacgagaaacccagcaagatgcctcccaggcctttttttttttttttttgagacagagtctcagtctgtcacccaggctggagtacagtagtgcgatctcggctcactgcaaactccacctcccaggttcaagcgattcacttgcctcagcctcccatgtacctgggattacagatgtgtgctatcacacctggttatgttttgtatttttagtagagatggggtttcactatgttggctaggctggtctcaaactactgaccacaaatcatccacctgcctcagcctcccaaagtgctgggattgcagacatgagccactgtgcctggccacctttcaggctttgcacacacatgactacatgtatgagcacactcatgctcacacaaatgcatccacctatccatctgcatggacccacatagccgagctctggtgagcatcctccttcctccaggcgcaagccaagcccccactttctggtcaagggatccatttgggggacaaacactctccctcccccatacagaagcagtggcttgccagcagggtaaaatttatcatcattatcctaatatcatctccaggcttggcagtggcagcagctaaagaaaataccaaggcttaacttggggtgtgcaggagagagaggcaggagataggaaatatgatttatgatggaaatcaatgcaatcataatactttgtgcttataaaattgggctgcgcctcctgtgcccacacagcccgcatcagctctgcctgtcaaaggaggctaggaaccctgggctctgggaccaggatggatgcagagacccaaacgatggccattgcccatcctcttgcctggtcttccttggggcagtgggggttcagggcattgtccagagagaaaggtggagggaagaaaaaggacgtcaagctggccctggggcacagcgctgggcatggttgcccatgtggcttgttctgctctcaaagccaccctgtgaaggtagatcacacaccacacacacacacacacacacacacacacacacacacacggctcctgcattttcaagtccattaaatgaagcaagagcacagagagcttaaaatcttttattttgagttcaggtcaccggtagtcatggccgagctagtcatgctgttcccatgacatcacgtggcctggtgcccagtggagcccaaagattgtaggggcctgccatgacatggggtgtgaggggcccctagaaggctccactccacccagaacagcccccccgccaccccagcacccagaatcccatcactagcagtatctctttgagctaagcaatattttttactggttatatgatggtggtagtgacagtggtgacagtgacagaggtgctgataatggtgacaatgatagtggtgacaatggtgtcagtgacagtcatagtgacaaggttaaggtaacagatggtggcagcgacagtggtggtggtggcagtgacagtagtggtgacaatgatagtggtgacaatggtgtcagtgacagtcatagtgacaaggttaaggtaacagatggtggcagcgacagtggtggtggtggcagtgacagtagtgatgacaatggtgacagtgacatggtggtggtgacagtggtgattttccagatgtttgttgcaaacatggggcgggggtcaggttaaacacagacaggcatttcagggagaactggagataaacttgtttctgcttcacaacttttctagaagaactaaaccaagaatcctgtccctggcacagtggcctgggagagcatagaggtggaagtaggtagagtgacttttccttctggtaaacttgagcatgagcatgcttctgtcactgagtggcaaatctcgcaccatgtgacaaaccatttgtgctgaagataaaggggccggggtgatgggaacatgacttccgaggcagaggacgctgccatctggagatgaagcctcagtcactgagggggcctccttgcaggggcatttcctccgcaggccctccggaacatgccagggctgcagtcagatgggtgggtgaacaaatgagggagggaatgaatgaatgccatcaggaacagctgcctcctggtggcacctgctgaactcagcagccgggaaagaaattagaccctgggaaggagggtcctagctagagagccgggtctctggggacacaggagctgtgctaaaggtgggcagtattgaggccaggccatctcaggaaaggccctcaggtggctctgaagatggggagaatctcaaggggagggtgtgaggctcaccatgggaggcagtgggtctcgccagtctccccaccacatcctcctctccctccgcttgtgggacactggagcccaggccagttgggcccacaccgttagcttcctgtcctgctcaccagaccccagggccaccgcaggcctgtttctgaccagtgtctctgagccactgaggaggaagcagagacaggagatgctgcccgagcagaaaggatgtagcatggaagggtcgacaggcagaccaccaggcctgtgagcgccaggcatggtgagtggagcacagccggaggcggccagggcccaggagggacaatgaaatggaaagaaatgaagtgggacgcagccgaagcctcgggtccgggtcatggggccagcccggcagccccgccgggggttggggtgacagcactggcatttcaaagggcaccccagggccagcgcctgccttgacgagacctcaggagctcgatagactttctaaacctaattagtgtttaatggcctggagagacgccgcatccaccgtcatcggccacgcacgctggccagcttcaggttcttaattaacctttaaggagatgatctgctggtggccgcctcaggaggccacatccatccctgctggcatgcacgtgtgccagggcctgtgggctctctgggcacactgtcacacatatgagtctgagggtgaccccagccactccctcatagcaggcttttggaaatggcaggtggacaaattcccactgaggtgtcctgggggcctgggcttgtggaggggaggccatgctaagaactacacaggataggccacatggggtggctcatgcatgtgatctcagctttgggaggccaaggtgggaggattgcttgagcccaggagttcaagaccagcctgggcaacagagaccccttctctacaaataattattttaaaaattagctgggcgtggaggtacatgcctatagccccagctacttgggaggctgaggcaggagcctgagcccactgcactccagcctgcgtgacagagtgaggccctacacaggatagagaaaaggagagaggaggagactggcagccaccacagccgtgaggggcgcattctggctgtgagccctccctgagcgaggctcctggggctggctgtggggcatgtggccagcagactgaggagatgagctatgatctggggaggtgggggctgctcctcagggctcagaagtgcgctgcgaagaatgtcacaggaggctgaatgcaggaccatcaagactgagagtatgaatggctggaatagagttggagtccaagctaggggagcagaaggtattggagggagggagttgggcccctgggcagtggcggtgatgttcctgccacagcaggctgcgggtgtcaggccttgggctggaggccatgccagggagaatgaccagtcattcagcatgtattgaggaaaagggagaggatggcggtggagattttggaattacctccaagggagtgaaggttgaagagagccacaggcagagtctctaaggggtaggagagtggggcaggtttaggggcagtgcacctgtgaaaaccctgatgttcaggggtcgaggaggacctgagccacctgcccagacacaggccagggaggacagggaattcagaggagagctagagagggtacagtggaggccagcagggggccacgcctgaccacactcccacacttacacagcacgcacatcacacaccatacctacacccattcacccccacacctccacacacacacacacacacacacacacacactgcatgcactgacatgcatactcacacatggacatgcacacacatgcatttgcacatgcaacacacacctcccacactcctagtcacccatttacatggcccacccacatccttgcacacatactcacgtgcagacccctcaccatacactccagccctcacgcacacacattcacacccacacctgagcctgacacccttgcaggcagtgcccgtgacctggagaccctggcgtgtttcaggaggagggccgtgatcgatgcttattaatgaagctgccctggagatggctaattgatggcggtgcgcggctgttgtctggaatttaacccgattcgtcattagcctgttggaagctggagagctgtgttaattaaggccaggaaaagagacttggacgagctggcggtgcaggctcatgttagaaaacgggagagcaaggggcagagggagagaggggggagcagagggagggagggagggagggagcgagggagtgattaaatctaaagcccagagacaaaacaaattctaaaaagcaaatgtcggtgccatttctaggatgactcaggtttgtgcttggccggcatcatcaggctgtggcgtagggattaagagcaatttcctctcgatttgtcatttacttggtgtgggctttgttttttcttttaacatgcctggggactctttcctgctctctccaggcctaagattgaggcccgggagccacaggagagagaaaggagctgtcccccccgggtcagggcagggtgagggtggaaccaggacacctctcctggccgtggagaggctcagcttagaaacagagtccacagtccggggggagtggagggaacagttacacaggggagggcttggagggggaagggagactgggccctggataacacagacaagggtctccgtccagccgccggtggccacaatgccacccccttctcactcccacccagccagtgtgctctaaatctcctaaggcagtggtcccactgtgggctgggaagggccagtcacagctggagagatcccctcgccaggcccaggaccccacatccgagggctcctagatggttgtgagctgtcagggtgacaggcccagaaacccagtggtgaagggaggcctgggagtttagaagaaagacactgaaacctcagggctacatagtggcccagcactgggggcagcctctggaagatgggcttgagttgcccagtggggcgctggtaccaggcagagtggatgagggaaaatgcatgggagatgagttggggctagaaatgcctcctttctaatcactagaactggccatcctggattacgacgccccatgcaggagggagcctaactccaacactatacgtatgtgagcaaatacccaagagccacacatcagaggtaaagaacgcactttcaggagagtgggaggccaagtgcaggactgcatggctgggcattcagggaatcaagcaacagtgcacagccagctcccaggaaggatggacccggtgccctcccagcaaggcccttctggagactgggtggtggctccctcagggaagagacactcatgttgctgtgccatccaattctatagaacagggcctggcacacagaggtgctcagtaaacactggatggatggatggatgcatggatggatggatggatggatggatgcatggatggagggatggatggatgcacggatggatggatggatggatggatggatggatggagtttgtggcccatcacaacaacagcttcagtgctggtagaccaagcagagagggcagagctggggcagggtggaggagaggcagcacgggcagaatggagccatgagaacctgagttcagggtgcatcttgcctctccatgaggcgtggcctccctaccccattctcagctcttccccacagagtccaacatcttcagttcagcagagtccaaaagagcctgggtattccggagtggaaagggaaaagtcaaatgttaggtattcctcaaaagtgatggaaatactaagaaaggcagggaagatgtgagaggaggaggagaaataggaagaggggaaagaggggaagaagggagaggagggggaagagggagaggggggagaggagggagtggagggggaggagggagagggtagctgtcgcttgtttcctgggctcttactaggtgccaggcacgatgttcagagcttggcctgagcgatcatgtttaatcccctccacaccccatgaggggatacgtggatatgcctctcagaggttaagttaacagccccgccttgtatgagcaagtatatggcagagctaagaccgaaatccaggcctcacaactaaatcagggcctgtttcatcagaattatctatccactactgttatttaaaaaattgcacaccctcactcccccaccctgaagagggttagcgacccagccgaccatgccggctaattagcttggttgccacggcagcagatcttaattaagaccacaaggatcctcccacccttgccagtgcagccctggcgtgttcacaggagcagcaagatggacgtggggcttggagacaaagagccctctgcccttggcagtgagggcctcagggagctctggctgagaggtgggggcacgtcagcccagcagcagcatggtcacgggtccaccagttccatcttggtgattttcatcgtgtccttccaccttacctgccacgcgctggaagcttctacccataaatatggctccaaacccctagcagggaggggctccctccttccccctgggaaaccagcagtgtgcttgaggctgggcctctggagggatctttgaccactgtgaggggcacctcttttgtttgtgccaacccagccctgccccttaggtgaggggaaggcattttgtagagagataggagagggtggaggctcggagagggatgggagagagtggggagagcagagagaaggaggagcaggcagcccccgccagcccaccagcaggctatgtcagggccgctcactgcttctttctggacactgctgagcagagctgcctgttgcatagcaactgcccgggcatatttgtagggggctggaccagtgaggctacgtgggctgcaaagggtgccacctggaccgagaccactgcgtcccaccccacatcctgcagactctttgcaagtggacggtggacaaggctaggcttggactggagtgaggggtcattctacaaccaagaataaaaggcaacctggggaaatttgggccaattcatcaagcacctcctatgtacaagctttaggctcctgtcttcccacaggtggggaaggcacctggtgccaaggttctgctggtcattctggaactgaacaaacgtttgcttggtgtcttgggcacctctgtccagtcacctctgacttcctgcacctcctgcacgtgcagctgcctccttgctctttccaaatgcagtcctagtgtgcaatgctgtctgcaaactaacaggggctcccgctgcccactctacaagctcaggccctccatggccacaccagatcctctgcggccacaccagatcctccccacctccacctgcctgcctgtcctcccaccctcggcgacttgccgcacaccctttcacaccccactggcccttccctccactctcctccaggtctttggtggttattcccacccccaccccatccacaccctgcccaccccatgaatttgctcacctgattcatcaggtttcaggaaggactgaaggatgtgagccctgtcatgaggtcaacagaaggtctggagcatgggaaggacttgaaaaccctctctcactgcagttcgctcatgcctctgagacccgagtgcacacccccagccaggcacacagcaccaacccacacgcctggttccttccaccctgactcaaagccagcatgtccaagtccagcctgaatccccgccatatcattatcatactcggagcctgtgcagcttctcagcgaccttcccctcatccccttgagggctacttttgacagaaagtgagtccagaggcgatgactggaaaggcggtgagtgtaactgggtggacccaatcacagaaggcttgctggaggaggaggcaaaggcttgtgacttcaattgcagacacagctatgagaggagaggtgaaaaatggaatgcagccagtatggggagatggtgagacatgtctgcagattaccctgacacaacctcaagtgctttgttcaagggacagggcgttgggggaagaagggacagccagccccgcccaggcagcgcagcgctggaagtctgaatggagaggggtgaagagctgacagggcctacgtgccggtatgtgtcctgacccaacaagcatcagatggcctcctcagagtggggagtgggagcagagaccaaatttattaaaaaatcttatctggagggtttgcattttaataggctctggatttgcatattttaacaataacctccggttcttctgtctggtcggtgctcactggctgtctctctaaatgatgatcgccaccacttcaataaacccttcctaatccaaaggtgcaacgcgccactttgctggaggagggaggattaaagggcctttctctctgggctggaaacaagactgtccggtggtgacccaattctggcctctgggcactcttgctgcaagggcacagatgaggcaggagggaacgagggtcatgacagggtgtgatggaggattcagtcatcatttggtcagtacctcctgaccacctactgtgcattggggccatgctgggccctgcgtgggcatcgggaactcctcagggtggagacaaacagacaaacaaatccatatatctgtcaggtgtctctgaaatcactgctgagggtgtcctggagtcagaattttatgctgacaacagatgagatttcttgaatctctaacccctctctatggaacgcaccatatgcgatttattaaggaggtaattaaagcattaatatatttacaacaagctagaaataatgtgtgccgcttctgcggttcccctgggatccagtctcactagggcactgcagaagccctcaggcaagggttcattctttcctcccacagcgactccaagactactaagcacagcccctggaattcaacagggcctgtgattcagaccctgtcctcctggggctttaaacaaataatttcatcattaattaatttgttaattacaatttgctaagcgccgggaagacaaatttctggtggagggcggggtctctggagagtaaacccacctttgatccccacaagctcactggtgagttctctgtccttatcgagttggttgcatcaccaggcttttatccctatggctgaaaattcttggtctatcccctcaaaattgcacaaagcttatctttaaaaaatggactgatgatctttctggagatagcactaatgcacagacctgggcaatgcttaaaacacctgatgatccacaaaacgcctgatgtctggtggggcagatgaagatggggacccagaaaggcacccccaggtcagcgtcatgggcaggccaccccatgtggccacacagggccccacactcagaagagtcctactcttgggtttcgtgctctgcagtctccatcttgaaattcttaacactttatctttgaatgtgtgctttgcaaatgaagtccatggggcttggagtctctgctcatgcatagttcagcctctctctacctgccaggtccacccatgtccagagtcccacctgcaatcattgctgtaccagccagcagtggcctagacacaggttaaggggatcagggttggtcacgttcaccctgtggtagcccaggctggccgtgctgtgccacatctggccagccaaaagaggccatgactcagcaaagatgagtctattgcatagatacctagcacgtcccaggcacagagtttacaatacccttgaaagtttcctgtccactgtgggttaggactgagagcccatgggaagaggtgatgtctggctcgacttctcagagcctaccctcagctggggcttgacacatcagtccatggccaatgagaagggaccccggcagtcctcaggcccaaggttgcaggtgggactccaggggcctgtgagggcccctgtgtctgaggcagaaatcccttggaaacttctcctgcctgggggacctctcttgtaggcttcctgagtttggcttgcgtttccagctgaaggcaccctccaggcataagccacaaaatacaaactgtgaaattttgatgactctgcataggaggtaaatgccctgatatttgcatttaaaactggcattgcacaaaataaagatgaactgtaaagtctgtgctaataatttaaaatttatagttttctttacttgaaatgacatcaaatagcaaataaaaaaaataccacgacaaattgagagagtgagcaagaccaagaaggaaaggctttatattttagtactttaatgacactttttattttggcgcttggaacaaggggtcctgcaaattatgtctgttttctcagagcagtgatgctggtgggattagggcacagtgagctctagcgtgcgggtctgctgattcactgtttccatgaccatcgtgtgtgctggggtggggttggagggcagagcataaaacctgagttatctgggtggataggaactggtgttgtcctaaagcaccaggatagatgacgagcagggccaagtccacacaagcgcgtccacaagtaggtgggcaaggactgcccctcctcagaaaccacacaggaatggggaggtaagagctgccttcctggtgaaggctgcaaattatgtctgtttggggaagatatgaatctgtgtctccaggggtattcctccaaagcttggcgaggtgagcccttctgctgagcagggagccaggtatcttcaggctccaacacgtcccaaaaggaaccagaaggaccctcagctctgaggtttgaatagtcactctggagagcattctggccatcccatgggccagtcacctcggctgccagcgcctatcctccctctccccagctccctgcggggcatcagtccccaccttccagtgcaggctgacctttgctgagaacctgctcttgcagatttctttcatgatctcgttcaatgcgaatccccctgcttctgccacagtgaattcttttaggatgtctgtgatgtcacatagcactaatcagttgcacacacgtactccagggaagaagcacagtcctgaggctgcctctggggatccatgagtaggggccctgatctccactcttgtttgtgaagtaagtctctctccatctccatcttcttttctctctctccctccctctctctttctctctgtcacacacatgcacacacgcatgagagagagaaaggagtagtgcaggttcatgtgtgacaatcaggaagcctccctgtaggaggtgagcttcaaacctagactttgggggaataggagggtttgggtgcaatgaggagtgacagggaagctttccaggtggggagaaagtcaactccattatttcagagacagcactgggtgagggggccctgctggggcccagcgtgaagcagagggcacagaggtggacaagaggccagctctgaggagggcccatgatcccatgggcagtgacagctgtcccgagggagagtgaggcaggatgagtgcaggagtggacccccccttgcctccccgctcccccctggctttttcagctttggctttaagcaggcatcaggcagtgaaggacaagggaggctcagccccatcccaaacctccaggccaacccttaggacagtggttgctgctgaaggggaagccaggtgaagacattcccctcctttggtggcagaatgcagttgggctccacaccccacacacaggctggccctgctctggcagggtgctcattccagcctcggggagtcctagtaaggtaggggagaagagacgtgtataggcaggaaaatgtcgctcaccagcccagtgagctagcccaggtcataccaggaccaggaaaggagtagtaggaactggtggggtgaatcagagccaccttctcagacagggaggggccccttgcaccctggtcctcgggaaaggaggcagcagagacctgcagaggctggtgggagtagacttggcagcacagaaccagaaccagatgcaagaggaggcaggggaagcggcgaggttgggagggagtcaggaaagagcagcttggcctgtctttctgtctgtctgcccacaagccacaggcctccccttccagagggagccacactggacaggtgaagcctttcgaccagctcaatcatcgtatttattctaattgtatcataatcgtccccaaggaggctggttcaaatgagcttgacattattaaaattttaatgcccagttttcatagctgaatgaatatttaaagggtatgtcccagcttaagttatgatgatgaagaaattaatggaatgtcttgtttaatgcatggatatgtgttgatgcaaaaagtggcagagggatggggagggggaagggaggcagagcctgagcggaagaggaaaggggccatccacctgcccaccccctgccgcaggtgggagcagagacagctccagatctgggccaggcccactcgctccctaagaggggcgcccggctggaagtagaaacacagtccacaagggtttgtgatgtccccggaggactgaccccaggagcctccagggaagctgcaggtagctgttcctgacccagggaaggcaggcctggctcaccaaatccccttcaggcacctggaggaagacaccaactgaaggccacagggcctccatggggacactgaggacatctctgaaagagaatcagcaaggaaggctcctgcaccccagcccagattcccagcagccacaagccacagggccctccggggaggacagcgcactggtggagaggagtagctgacagaggagcagagacgggggcaggaaaagcaccaaaggggtcctgaggccatggccagggtcccagggggcaaagttacaagaagggcaaggagatggcaactggccttctggtcttcctcctgatctcactcctggctcttccctcctctcctggctcttcccctgacccctctgctctcccttgccctcgccctctccggcattctcttcacctctcccctcgctctgtcgtcatgctctgccttgttctctcccgatctctgcagcctggcccggcctcctctcccaggacagatgtgctccatcctcctccctcttcagggcagagtcagggctgagtgaggctggccaaggaccaggggagggaggaaggtttctcttcaggccagggccacctgtacagagcctgctccagctgagaaatcttcccgaccaagactgacactttatttctgctgagaattaagaaagcacagggccgtatattatctcaccatctagcccggcacctctctgacaagcccctcaaaggctgtctggatgctgaccaccatcagattataatggcacatggaaaatgaccccaggagccatggctgcatgggaaccaattccgttctcctttaccaatctgtttagagcaccccataggtgcctagcccatggctgaaggcagctgggaggctggatgagactccatgtccctgctgtcagaaagcccacagtaaaactggagggaagcagaggggcctgtgtgtgaggggtgagcccaacagcacgccatggaggaggtctgcctgcaccatccagggcccgtctggttgggagggctcctgcagcagggatgttaggccaaagcatcacaggtgcccagatgccaaggacagtgggctggctgcctgcaactggggtggcatctagggtggaagcctccagacacagggagatttcatttgcccagtttaatttaccatggaaaatgggacccgtcatttcagaaatagctctatcctggccaggcgaatccgcaggactcaccccagctgctctcaggcccgactagagaagactggctgtaaaacacagaaacaaggtgccaggaaaggagtctcctccagtggtcccagccttcctcccacacaggatgaggcccctagggatgtggggtctgcctagcatgctctggccctaggaatggagtctcctgcctcaggaatggcctcactcccccgttgggacagagcgacaaagcccaacagattctggttcacacccctgtgcctgccccttctcagccaggccttcctcccagccttgcaggggaagcctgaattccccatctggctccctgctctcctctctttcccccacactcctggcctctgcttggaactttcctggaccatcccaagcccattccacctgttcccagcatctcttaaatgagtaggcagatgtcaggagtcctgggttcatcttgatatcaccatttacaacctttgtgacctcaggctaacttcttaacctatctgagactccatttccttgactgaagttagagataatctatttgcatacatcacaggagaagttgtgatgatctagcaatgcgatcagtatagcagctgttcctgttctcaggggtgttatggatccttggggaggcctgggtcacttaagcaccacctccacttgcaagtcaatttccagccttgagtgtacctttttaatggaaaacagggagctccttgtagtacccttcccaatggggtaccaaccaggcttcatgaactagggggcttattcgttggctagagctgtcatagcaaagtaccacagaccaggtggcttaaacaacggaaatgtatttctcacagctccggaggctggaagcccaagatcaaggtgtgggcaggattggtttctggtgagggctctcttcctggcttgaagatggcggccttctcgctgtgtcctcctatggttttctctctgtgtgcacatccctggtgtctcttcctcttcttgtgaggacatcaatcatatgggatgagggccctactcttataactccattcaaccttaagtacctccttaaaggtaccatttccaaatacagtcacaatgggggttagggcttcactgtatgaattttggcgggacacacttcagtccatacagaagctaagtggactaggctcaaagaatgaatagactgtcaagaggaggaggctgggagggacagcagggagcttgaaggcccagggaatggacttgggggaggaaggtgccaggatgtgtggtgggagtggtacaagaggtggtggggccagattttgtggggtgggggtcaggcagaaaagatgcttgatttgctggcccaaagaacctggcctcaatctccctttatggaatgggtacttttcccacttacttcctccttggtcctctcctcctggagcagctgaggtcaactgagataaaatatgacaaagctaaaggccgttgtgttggtagcactcatgtgcctactcatcctggctgaatcccagctctgccgctcctcagagctttgttcttctcattgaaaagatggatataataatccctacctcagagaattgtaaaattacataagcagaaaagctgtagaaatctgtccaagagagcatcagggctggaactgggtccaggtcagtccttaagacctgtttgggggagaagaatgctacaggtttcagggaagggaaggctaggagggcggggcattccaggaggacatggcagcctaggaaagggtgagatgctgagtcccaaacagtactggacagggaaccaggagcaacctggctccctcctggagcccctctcccatagccagatgcctgggcggccttctggatctttccctcaaagactggaaaggagctcgttcacagggaacccaggaacttcattacgttcctccttcttctccctgtgattggaatttgctgtaacatggcagagttctctgctgccagggcttgggaacaaagtatcttgcttcccctcaactccataagggatgtcaagtggggacctggtggtgaacaatgacaccctcgcccctctcggtgggctggccctggcatcctcccctgctgcctctggctacctgtgcctccttccttgtcggctgcgtcctgcctcccatctctgtccttcccggccacggctctgcccttccactggccttgtgctcaccttgctgagtcacaggcacccatactcccccacccagttgtcctgacgcagccaaaactcacttcgagtcctagagcagaaggtaggaggaagcttgtgactggctggtccagccgctgtacgggagggaattggcaacggaaggtctcaaagcgcaggacagacatgcagaaatcaccccacaggccccacttcccagccatgtcctgccacgtggtggccttgggaagcacctgaatgcctcttggcctcagcctctccatctctaaaatgggggtgtttgtacctgccccactacctctctgagtctgagtttgtgagagaaatgcagatgcaagaagggctcagggaggtgcgtaagggcagaagcactggtgaagacatcaggtcagaatccgctggcgtgatcctcctcacgtttgttgcttaaaccactctgagacctccgggctgtagagcccaccctggtgcctcccggtgagccctgaagccaggcagccaagcccgggatgcttggagtccagagacccctagtgccctgaatgggccattgacacagatccccgagagggaagagagaggccggcggctaggggagtcaggcattgctctcctgtcctcctggcacccagacaccacaggggacaagtagctgtgcccactccacgcactccctgagagaacagccctggctgcaatatggagccccagccctgagctctgctttaaccatggagctggacggcccagagccttggccacgcctgacccataggccacttctgcgagctggtacgggctgggatcaagctggatgccctggcctgggtggggtccatctgcagccagtgaccagctcatttccataaaggcagatgtttgagtgaaccagggctgagccaagggtgtgctttggtgacacaaaggcctgtgtgacacagagggacaggccagcatttctgtcaacctcagattctgatatcaaaggctagtaggagctgctgctcggagtaggaggaggaggcatctcaaagtctcctgtccagagacacccccctgaaagaatggggccatggggccgtgccgtcgaggggagacgggcagcactttggtgaaggtgtgtgtgcttgcagcagcatgttgtgggagcgcgtgtctgtgggtgcagtctgtatactcgcattcacctgtgcacctgagtgctgggtgtctgtcccctcacccgcaggcctgctataatgctgtccccctctgctctgttgcagatgaaccggccgatccaggtgaagcctgcggacagcgagagccgaggaggtagtagctgcctgcgccagcccccttcacgtgagggcccacttgtctctgcccctccccctccccctctcactcctccctccttttcccgacgcagcaaggcgatgcagcgactccccgcctcctcctcttgcccctctggggatctcgtggctgagggttggggacagagctttggagctctgggtgactggtgtggagagagacaggagggaaggggggtgtttggggtcttccagacggtgcggtttatgcgtctctgagtaaacaagtgccatgtcccaggatattcttctcccctccattaaaacacccaaaagggtgtgcccacctcgatgtggacaaggaaaaccccaccgtgatggggcttgtgcagttagaagggagacaagaagtggtcacagctgtgctgtaggaggattcaggccaaggaggcaaatctgagtggtccatgggagtgtgggcactcaaggccagcactgaggcagagatcctggagatagaggcaggcagtcagacaggtgtctggaaagggacagaggggaaggacacagcctcactccacagacgcttgtcctagaatgtggagcccactggagactggccgtggagagcctgagtaagggaatgcagcaccttgaggctcaccgctggaagggttaggcagacggccagccaggggcagctccgtcaccaagtgacagcatcctcttggcacagtgcctgtgtgtctgtactgccccccccatcccagccacagggttaaccagggcccaccctaggcacagccctggccctaggctcccctagatgagattcaaacatactctgacattaaaagaaaatgaaaggcaaggacatggcaaagaaaatacatccagcatccaagatcaggcctcccctacccgggcaccagctcctcctgcaacaaactgccccagtgatacagagcccatcacacctcacctgtgggagagaaacagactccccagccccatagggtagaagaatgtgcaggcccctgccaggtgccctcttcctggcccacctccttgggagaagggcattgtccttcttgatcactagtccccggcactcacactgagcctcatcccctctgggccctgcccagacgttgctctgaactgagctctcagccacttccccggagaagggggccaaacggaggctccgagcaggtgaaggacccccgagtagagactctgtcctctccaccatctagggcccccagcccaagttcccacagaggcacagccaggcagtgagccaaacagccatacagaagtgagacactcccagaggacagacgggcggtggcttcctacctccagcctcctcccactatgggagagaccttggctgctcttccgccagagacaggagcagcccggaaagggtttagaaaaattgagaacacccatgaggccaccaaggggagcgtaaggagttggggcctttttttttttttttttttttgagatggagtctcactctgtcgcccaggctggagtgcagtggtgtgatctcggctcactgcaagctccgcctcccgggttcacgccattctcctgcctcagcctcctcagcagctgggactacaggcgcatgccgccacacccagctaatttttgtatttttagtagagatggggtttcactgtgttagccaggatggtctcaatctccggaccttgtgatctgcccgcctcggcctcccaaagtgctgggattacaggcgtgagccaccgcgcccagctggagttggggccttttgttgccctgagaaggtgacattaggtacagcctccaaggtggccccagcctacccttccccccgccagggctggggtgtccagcatgagggcccaggtagtaagatgggacagccagtcgcagctgccctccacctcccagccaggagctcttggcttctgccaaccctgccacaccctgggctctggcccaagtgtccctgttcaccaccctcccctggcccaggcccaggcccaggcccagtgctctgggtttctccctgctctttagatcagccaggaaccgaggaatttctctccccctcatttctcagaaagtttaccgggaaatcaagggcaaaatgtcgagcaggtgaaagctacttgcaaatttggagagccagttgtcctggagggtgctgtggtgtggccgctggtgatctgttcatccttggggcctgtgcctgctcagaacactccttcatcccctcagtcaggcctctgccctccagccccagcagggcactgacttaggcacaaggcctctaggactcaggccccctcccaacccggacctcagatcctacccactagggcttgggctggtgtcttggggctgcctgaagggatcccatgccccagggcatagacgcacctcctcacaccaatggagtgctctggtcctaaggaccccggtagtcaaggtccagttggttgagggttagagatgcttcaggcgtgaggggcccacgtgagcgaagcccatgtggtttgtgctgcctgctcctgtcccttccttggcagtgagaggagtgccatcctcactcagcctcgtccagggcacatgaggcccacagcagtgcgaggggtgtctcctggagaccgtcacccaggcacacagtgactcacctgcagcccccagttcacacggcccggccaggaggcagtgacacacggaagctgtcatggatgggcaggaaagctgggatagtaggtgccagcagcagttccggagaggagatcccccaggcgggggcagccagaggcctcaggggaggtggcccttctggtcttgaaggtgggagatcccacagcttgagaaggggggatggcatgaacaagggccaccgacccaggcctctgagggccataaggaggtgccatctggtgtggagcaggcaggtcagagtccaggccattttctccagcactggagagggatgtctggaatcccctctgcccagcaaggccgtgctgggctctaactcaaacctttctctccctgaacttgcctcagaggcaatagctctctgactccaagatgctaacctcatcggctttctcccatatatctcctgtggctaacactcgccccaaaccagattactcagctcttttattcttcttgcagtagaaagtggggggggggggaggtgtagggaaagccaaacctaaacatctttctattaattgcatattcaatattaaacagtgagatggccctgagtcagcactatcaccaagctgtgtggttttttttttaaaagaaagttagtttaaaataatttaatagccattaaatacttctggggagaaggggaaggggggagaagtgaacattttagaagattaaagaaataggcaacaggagaggggaatggagagaaggaatgggagaggggtggaggaggtggcatgacggcagcgggcaggaggagaggagagaagggaaggaggtgagaaaagtagagaggtgaggggataagcggcaggaggaggagggggagcgaggccttgaagacagtgggtgagggaagactggggcacagtggtgcgaggggagcagaagccagcagtggccgcagaaggagggggagggtcagccccagccctggctcagcagtgaaccaggttacgagtccccgaaacccagaggacacaggacacccatccacagctgccctccaggcacacttgaatgctcataagcagcacagaaagatgtcttatctgcttaggatttggggaacatgcggggcctttggccagggggcaggaggaaggcttctctccacctcgcccagcacagagcaggctgcagcccactgcatggccatatcgtggttccaccttctcatcccccatctcaggcctctagacacattcccggtcacatccacccacacacatgaggtgtgggggtgtctagggatgggcatggcggagagttggcaggtctgtgtgcacaggagaggctttgtaactttcagggctcctgtctctgacacacatggattgctggctgaggctgacaggccactgtcctatcaggagcagttcagggagctcttttttctttggtgtgagggcagtgccagccttgcctctggaggggttggagtggagatacaagtacagagggaagtggagctggctgagtgcttggctggagcaagcaccaggaagagtccaggaagagtataggatgcagttcttgtttttgtggaaggttcttatccggaatgagctccagctgaggcacaccaccttctctgggcctccatctccttacctgggggtctcaggagtcattatccacaaagctgttatttacagaacactgactgagtgttagggattttatggaaatatggttttgttttgtttttgagatgaaatgaaactttgcttttgttgcccaggctggagtgcgatagcacgatcttggctcactgcaacctccgcctcccgggttcaagtgattctcctgcctcagcctccggagtagctgggattacaagtgtgcgccaccacgcctagctaatttttgtattattagtagagatggggttttaccatgttggccaggctggtcttgaactcctgacctcaggtgatccttctgccttggcctcccaaagtgctgggattataggcataagccaccgcgcccggccggaaatatgtttaatttatacagcaacctcaaggtatggatgttcttggccccacttaaaggcacaaaccaaggcacagagaggctagataacttgttccagggcacacagacagaaagtggcagaaccaaaattccaactcctacctgtcagccaccagaacccagattacctatattcctctcactcccaggagggcttctcggactctgggtggcctagaggcagtgggaagacaccacagacatttgtctcacctttaggcccattctcaaggtggctgaagtgagaggagcagggttccaggtgagggaggcagggctaggctggacaaggagctcccagacctactcatgagacatgaaagaccagggtaggagtgggtcagagaagagagaattcactgtggcctggagcaagcaggaagggcttcctggaggaggtgggaattaggaattagatcaagaggtggagagctgggatacagtgaggacacaaagttaaaatggggcctcgaacacaaggccaaggggttgggcttgtcaccattggaagcaggagcactgatcctgggcaagagatcacagacagagagagggctggaatgtccctgggcaggaagagaagagagagggcccctgctaccaccaccaggatctggggttccaattaagtagggaaggaaggccaaagaagagcctccccaggagtcatctgtctgcatgggggatccagttatccccaaaagcacactggagcaagttgtatttaaactcagatttatccccaatataagcaaaccaattcattaaccagtgatgctggctggggacagagccaggtggagagcaggcccctccctgcctgccctgaacatggcagctggccccctcagaggtgatgatacctccctagggcatgcgctgcagtgtcctatgcctcctggcaggcagacacaccccaccccaagaccccatgctggggtcttgctcatgctggctcatgctcagcttctaaatggagtctccatgggtgtccctaggaagctgccctgcagccctgaccacttcctctcctcccaggtctcagtccaggtgacaggacagttcccccaccaaggtacctcctgcagccaggttgtagggcctcctttcagggagtcagagatgagggggtagaggctctgactaccatggcctcaggcagccagcttgcttggaaagctcctgggctgaacggatgtgtgtgcccaccccgcttagtgggccgaagaggatcagcagccagacaggggccctgaaggaggggacgagtggctgatacctgggtcaggtatagcagactgcagatgcgtgctatctcccctgtgtccctggggaggacgtttctttcccgcctccctgggtgcatgtgcggaactgggcgtgtgtctgcagtgcctctgtcagtgaccatgagtgcatggcacactggggggtgctccatgggaaaactgtgtgacagcaccctggggtcctccagacacagagcagacaaggcccactttggctaaaccccagtgtgatggttactgctaggaggtggggacggtctttgatgatgctggctggggtggggcacagactgggaccaccaggttttatctcatcaacacgaaatgacagaaaagccagcaaggtggctggctggggagaagttagaaaccatgaagagttgggaggagagtcctgggaaagaggggacttgaggactccctaggggctgccacctgcccgtgctcatcttgtctgtgtttctgggcctgtgtctgcctctgtctctgtctgtcctgtgggctccctttgtctctttctacccagtggccacatgagaaccaagtggaagctctgttcagcagggccttggggataacaggcccaactcttgtctcccaaggcacaggcttgggagggagcgggtctagcactggggagtccatccagagggaacacagcaagaaagaaaaccaccttccagggtctgccaccctctccaggaacccagaactgaaaagcacacgacacacagacacacacaggtggccacctgcacagcagaatcgggcccgattgcatagagaagctgccagatgaaaccaccggccgacaacacacttctggctgtggcaagtgaggcccgggctggaggtcccaccactgagaggctcccgagtctctccctggtcaatgggagcctattttccttcaggggcttctatcaggcccagggcagatcagcaaagcaggcagctgagaactgaacccaggagaagcaaggtaggcaggtgaaggcaggcagggctgagctggccgtgagaatgtcctgttgttccccccacaagctgcaggggaggctggaggacggaaaggggagcagcctggggcaccagccaggaagggggccctggcagggtggtggcagtaagctatctgcagaacccctgggacgtttcagagggtgaatgaacatcttttatgttcccctaccctccccaagtcctgcagaattgctcatcttcctcccttggcctctgtatctggacctgggagcccatgcccgtgtatctttctttccttttctttctttctttttctgtctgtctttctttcttttgagacagtctcactctgtcacccaggctggagcgcagtggtgctatctaggctcactgcaacctccacctcccaggtttaagcgatcctcctgccgcagcccccagagtagctgggattacaggtgcccgccaccatgcccagcaaatttttgtgtgtgtgtatttttagtagatacagagtttcaccatgttggccaggctggtcttgaactcctaacctcaaatgatccacctgcctcagattcccaaagtgctgggattataggcgtgagccaccgtgtggccggaagccagtgtttcttccctccctgcactcctgcatcttgtgtctctgtgtccctgtctctcagcctgtctctggtggtacctgggcagggtgaggaaggcatgagagggttggggtcaggtgtgacagcctgggaggcatccctgagacagctgctggccaagtgtccagcgttcctgcagcctttaggtgctcccagcatacttcacagggtcttcagggcatcccccctcaccatgccagcactgatgtggcagcggagtcccgctgggccagctaatgaggttggatacaatgtgagtgactgggctcccaggccctccctgaggccacgttccccaccataaacccgtggccgattgcatcctcctggcccctccaccatctgtagccctatcggttcctgcggcttttaaaatcctattaaattcctcattactcctccgagcattattttatttctaaacagacacagacaatgtgttgtctgcaagggcttcaagggccccaccagctgtggagtgcgggcctgggtgggggcagcgtccagtggctgcggtgggacaggctctggggcatggctggggagacccctagccacaactgctgacttttggtactgggtttctcccttccagaatcttctagctattctctcccacactaggaaggcagtttagcgagtgtgcagatgaactggatgtgcaagctggccccgctttacaaaaattcaatatacagaagtgtcaattttccaatcttaggagtcagcgagtgactcactggacaaaagcatctgggtgcacagaaacttctcagagctctgctgaggaagccctcggcccaggcaggaggggctgcagagaaacatccagagggctgggaccacagcacgttgaaaattaatctgaaattacgctgagtccataagaaactaagagcctcctcccaggtccagcatgtccttacccattgatttggtgttggtttggactctgcctgggagaccctgggatgagcagagctaaccccaccccagcatggagggtgcagtctgagagagaaggcgtccagtgactgaaggagaaggagtctgcccctcagagccggagacccccaccctcacctgcccacctgcttccacacttttctgtcccacagaggcctccgaaaggtgggctgtgtgtgggctccacttgtggcccctgtatatgtgttttgggggctacatatccttgttccagaccctgctccagacctggacgtccacagctcatcaccatagcccttccacagccatgtccttggccaagggtcctggggaggcatcacaggaaaccaaggggagtttggattggggaatagttatctgcccagttggccaggacacagcacctcctaggcctggggggtgggcaggagcccttgtgtctaccctacccctaccctatgagtctgtctctcacccagcttccattttaaaacatttttaagaagtaaaacaactccacagcctctttcagtctcctctccatgccttgggctcctgctttgcctgcctgtcctgccctatcccctacctgaatttctcaagctataggtgggcatgttttcccttgaacaccaaccagtgccaagcgtatgtcctgacagatcttttgtatacttgaatcccaggtttattgggggctgatgtttaagaaatgacattacaacacaagaggtttgtgtgagacataagacagcatggccgggcagtccgtggtgctcagacaggcgctgtgcaggtggtttgaaagtttaggaagggctgaaggattagcaactggccagattagcaactggccaggcccagctgctcgcccagggtatgacttccttgatggtcaggaagttctgtcacctatctgaccacattccctgccatttttgctttagcatttccagccattaggttccctagatcacagtgcagcatttctctgccctggggttttattctcaatgatccctgttccttctttttttttttttcttttttttttttttttttttgagacggaatctcgctctgtagcccaggctggagtgcagtggcgtgatatgggctcactgcaagttccacctcccaggttcatgccattctcctgcctcagcctcccgagtagctgggactacaggcgcccgccaccatgcctggctaattttttgtatttttagtagagatggggtttcaccatgttagccaggatggtctcgatctcctgacctcatgatcctcctgcctcggcctcccaaagtgctgggattataggcataagccaccgcgcccggacgatccctgttccttctgacttaattttttttttttttttttgagacggagtctggttctgtcgcccaggctggagtgcagtggcatgatcctggctcactgcaacctccgcctcccgggttcaagcaattctcctgcctcagccttctgagtagctgggattataggcgcgtgccaccatgcccagctaattttttgtatttttagtagagacggggttttaccatcttggccaggctgatctcgaactcgtgacctcgtgatccacccgcctcagcctcccaaagtgctgggattacaggtgtgagccaccaggccagcccttctgacttaaaatttaagagaatctttatctcctttctttcttaagcccctttgtaaaaataagttttaaaaagctaggaagcctcttctatttacacaactggacccaaacagcagctgcgtgaagaattggtcttcgtggttggggaaggaagtggctggtggggaagagttcccagagagggccctgcagaggcaccagcggagcaggcacacattataaatacgtctgtaactcctgccataggtgcgaaaatataattaactgcaaacctgctgaatttaaatggactttagattttcagctgtgggagggggtgttgattgatctgcattttgtttttgaagtttttttaatccatttggaaagttaagttgagactcgcagctcctcgacaaattccctgtggccccggctaatttagcaaaggattgtttcaggggaaatgggatattaatcatagcaaatgggcttctggatgatatttaaaagctgcctcatgcctgtgtgcccaggaataggaatgacagagagaaggcaccacggccttctcgtgtcccatcccatcgccactcccatgtcactaccgtctggcccggccactatgtgagcgtggaggagagagacccccacttccttgggagatgggcgagaggagagaaagttcccaggcaatcctcccagggctaggtggtgtcctccacacagcacagagtgagccctggtgtaccaagtgagcactgagtgagccctgaacgtgatgtatccagcgtccccctggccccggcacaccgcactgggaacagcctgataaaacacgggaatggcagggtgtgcagggacaggtgattggggggagggacaggaagagggatgagacggcatgaaccagagagatcagaagtggtagcacctgcctggccttcagaggggaggaggatctgagcacggaagagctcaaagagcagagcttcccgagtgggaaaataatctgaactaaggcaggcttggaagaccccaagaggccagaatggggggcctactttgcaggggagcaatgatttccagaagctgctttaaatggatacatttaggtaaagggaagccatctaaagcttttgggcaggggagttatgtgatagaaatggagttttggaagcagtcgtctaggcctgctgaactggatagagggagggagcgagagcaggcggggagcagggacctggctgggcttcactgcccgccaagccctctggtcccagttccatccccttctcacagtgctgtcttgccccgagagctgcatcatcctattgcaaagtggatggtgacaccccttcggagctgccacgggagaaacatagttggtgaactatggaatcttccttgatgacagctgttgaagttgtcattttatttttatagtccagtccatgggaaaagagaggaggtggcaggggtgatgacctctggcaaggtttgattgacaagtgcaaatagaaatcatactgcctggggccacagctatattgagcatgtgaattgccagaatggaatgggataaggaaggcttcctgggggtggtgattatgggaatgacaagtctactgagaggacaaatctggactgtgtcacaggcaaaggcatgaaaacagagacaagcaaggcaaaaatgtggcatcctagatatttcaaagtaatgaagaaatggtttggctgaagagcagggtccactttctggaatagaaagacccagatttggtaaaccatgaatctcattgctgctgacatcccagggcgcgcatacctctgctcgtgcacacgcgcatagtatctgcatttgggggacgtcgtctcttctcatcctctagcccaagcttaccaggcccatcctggagtcttgtttctctagttcgttctcccatccagtcttcctggtcatgccctgcctctgttagcgggatctgctttttccctacccagcccaggacaaggcacatggggaccaattactgcctgtagcagcagctgctagggctctggaaggaaggtaaatagagccagtggggcctcaatcctctcattaagtcaccccagagcctccaataagagtgccttgagccttacagcagccctgcacaattgggtgaggatcactcccattttatggaggggaaaatgagagcttggagaagagaggtgacttcctcaacaacacatggctagtaatcagcctttgcacctctgtctttctgggcagtcttccaagccttgctgtcctccctcggatctgtgctggggtgctgacacctagaggaagttcttccagcatcaataccaaccatcagatccattaaggatgaggatgggtcctgcctcagtcttcaggctgggttctttagcttctcatgcccccaccccacataccctttggcatgggtgggtagtaggggtcctcagagagggtctgaggctggacctgcccaggtcaaagcccagccaggtgtcctcaaagagggtctgaagctgaacctgcccaggtgcaagcccagccagcagcaggatgagcctgtctgtgctatctgagtgtggagggtcagctgggaggagcaggtagagaaactccatgtatgcccaggttgagaaccaacctgaccaggcatggccttgtctgtctagggcctggcaatgacgaaggctttgcagaaatctagaggtcagccgggacccttatcggggaaaatccatgatcccaacgtcctagacaccaaatcctggcactgggtgactggcctagatgtcttaggaggcttgaggcctgcacataaatggccagttgcaaataactttaaacttcgagggacagtccttgctcctggagagctgatgggcgatgacagacagatacatggaggagatgtcttcaagcctcctctgtgctctgggccctagagaagcttacagtctgggggcagggagatcagccggcagcatgctgagcatccaatgagtagaggagacagcacatcctgcatggcagaggggtggcctgtgcccgctggagcagtcagggaagggtctctggaggacagtgtctgctgcagggggttccaggctgaaaagctgctgagaccaggaatgcagaagccatggcttaaagcctgcccagggcaaaaggaggaaaccagttggccagagaagaggtttcagggaacgccaggcaaaggagtttggggtggggaggcagttccagaagatgatggggagtcttcgataccagagagggagttggtgattgacagaagctggacttaggaagacaggtcacctgcagggatcactggaaagggaattagagggaccatccagagaccaatgcagcctccagtcatgaggggttgggcagggggcaggagaattagactgtaggttcaggagcccgtcattgctatgaaatgtatgccccaaagccatccctgccctgcccaggacctgctgcctccagacctccaggaacatgcatactttcaggcgcatgtctatcctcagaaagtcatctctgacccttcccacctgcccagctccatgttgttggtcagagctttcgtcacggtacaccccactgcaatgctttgtccagcgggtccctactggccttcccagctccaaaccctttccctgccctctgtctgagcctttatgtcagttaactcctgtctctcacagagactgtgccctccttgagggcagccaggtctggccttccacagaacctggctggccaccaggccccacagcctccttgtgcttgtaccatgaggcccatctctacgcagacgtcctccctaccttcaggctctctgctggtctaaaagcagccccctctgtcgtctccccaccccccagcccacaggcatggggtgggcagtggggccgatgccactgacattggcattctccttgtggcacatcttaataatttaatggctattagcagggccgctgtggtggtgggggagcgggggacggggggaagatttatagagagaattcactccaggttggggttttgtcttcctctgttttcctggcatttatcatgcatgttttaatttggatcggagagttgctaccatctggccattatcacaaagaaatattcattttcgctgagtgacacaggctccattcatcacagagcgtgctgattgccccacgactgtggggctgtgatttctccttcatttgaaatgaaccttgagctatgagaaggtccaatttgcccagagcagaggcacagggcaggtggctgccactgaccctcacagccaggtgggcggggagcaccctgggggacaaccaggctgggagtggagtacaagcccccttctgccatcacagccacctaccttccctcaccgctcctggggaagacttggtggccccctctgtctcacccaagccttctgacaagcagcactcccacctgcccccatgcctaaagtggccagaccacagaggtggcaaacgtggctcctctcccctctccctgggccccagcatttgagaaatgaagcgatgctgtcctgtcaagtgcagaatttgcttcggcaatctcgccctgacggagtatcactgtagcggtgtcatttcaggtcagagccgtgttggggacagagggccctccccattctcctctccttacgttttggtggcaccatcagcgctgggccccatgggaagaaatgtgtcggcctccaactgggacatttccttttatccgctcaccgctcaccacggcatgccatcggggccactgaagggctcttgtcagtgattggccagagtccaagcacaaggctgggacccccaggcaggggcagcacagagcacctcttgactgggctaggccacacccaaagccactcagtgagcagccacccggctctgccaagcagacaaaggaggagaaaatctcctttcacacatttgaagttgggagtcaaagcactctgaatttgttgggcccattctgtgtcccctgtcctggggcagaggtaagaagtaaaaatcaacacatccacagcaagtcacccacgagccaggtggagtcactcacaggcatgaagacatcagcagagcagtgcccccggccctagcattagacacgccaggaggggagtgacagagtccaagacgacttcacagggcgcctctgctttgccggaaggcagatctggcaggagggcttccatctacagaagtccctctgccccagggcttgacagtcagtcctcagggactgcctgacagtctctgtcctagaaactgtggccacatcccaaccctgaggccctggccccccaccaggacccaggtttgctcaaaacccagggggctgcgctgagtctaagggaaggcctgtgcgagctttgatgcctcttccccatcagggcagaagcccactgggtcctgtccttctgtccagtgcgccaactcagctgtaagcagagtgggtgccccataccccctccaattcccaggccaacgtgattctcggcctcagggtgtttacagttggttggagctgagggtaaaaccaaggaaacaattagaagagagggacagatgtagaatcaaagcactaagttgaccatcagtgagggccatcaggttcaataccagacaccaacctaccttagtagccccctggagtgggccaaggccttcctgtgggtcaatgtgtttctttttcccccagaccatgacttaggtatcactgctccattgtatagatgaggacactgaggcccatgagctcacttgctggggttaccagctggtgggtggtgcacttaggaaggagcccaggcccatctgattctcaggccatctgactcccagcaccaccccactgtgggtctgggaaaaccatgggtgactttgtgtaggagtcagcatttcaactggaggggatagcagagtacagaggccagcagaggccgggatgggagctgttacactctagacagaggaacctgcctgcctgtcctacaccctagttttctatcccggcacttgctgacctaaattagctgtccacagtctgatccttcctcctcccttccagcagactgggtgagtctccaccgtgttgtggaatgtggagcggagacatttgctaagagggacaaaggagggtgcgcggcgccccaagcccccgcgaatgctggcaccacccctcctcctctgaaactcattcagtgacaccagcagctctgaaacatctgctcctccatcccggacccgcaatttgaataaattaccccaacgtggcggcagcctgttattaatggctcgagttttataagatgctttagtttaataacactgtagcccagtgttgcacttctcccagatatttttatatttcaccccttctcctcctcctgttcccctccacgctgtggccacctccaaggctctggtccacatccccaccagtccctttgccaccaccatccctgagccatgctcccccacctgggaaccctattcctgtggaggccaattgggaccactgctggctcctgtttgggacttccagcccccacctgctccccctcccttctggaccctcaattttctttgtggacagcctcccttttgcggagagccaccccagggctgatggaaggggcagcactgcttagttgggtgctccgcttctacttcccccgaaaggaagcccatagtggcagggcggctgagggcagggagacaccacacagtgctgtccccaggcctggttctgttctcctcaccccacctccagagctctgctgagctgggggacccagcagaagcctaaaaatgaacctgcctctccccaggtggactggcagtggccaaggcttgaaagaagctgaagctcatttctttattcttggctctttgttcttcattctttggtcggtttgtccttgaatttatgccccacacacctcctgcatgaagccctcccaggttacctccacccactgccccaccatgggccttttggctgttcctacaatcccagctatatcccttcctcactgccctctgcagtgtcttctccccatagtctggaagcctgctgtctcatggaaccccctggggcctggtcagtgtctcacccatagccagcccttctagaatattttgattctgattaatagcaggtgctcatgcatgtgttttccgtgcattgcttccacaagcctgtgtgaagcatctgtgtgggcgatgcttccggcaaagaatggatgccttcactgagggagaatgtgagcccaggttgcgtgggtttgtaagttggggatatagggtagaaaatggtgaggttcagacaaatagccagtgtattcatgtcccagtctgttcaaaaaaattcagagcacaactgatgggcaagaaatgccaaatgaaggctccttgcaacattggccctgggtcaggcagtagtgggtacaggcctaggcaggtgtctggcacttaccatggggctggggcccagggaagccttctcctatgatgctacccccagggacttgtctccaggaggggttgggatgcctacggccaggagggccacagaatgacagtgtctggaaacagaaggaaaggacatggggtggggtggggaggaggtagaatgtcccgtcagacaggaggccagacctgcctcatcagagggtcctgtgaatcccccaaagcccacaaggctagcctgggagggattttggaggacgcttccatgccagggccaaatttaactgtgtagttccctgttcctggggacctggagagccagcagtgaccaagacgtggctctaaaaaggaggacgtgttgcctccctttttttctccccacccgcctcacctctgcccagcctagttctgaggactgcagatccaagctctccccgattctcatttggtctgatattactgtggggactgccttttgctaagagccccaccattataacataattactgctgaaaatgacctttaaaatatactttaaattcaaaatgtctttaaacccttcactgagcaccatttttcaatttcaacgactgttttcctttttgtggggaagtgaagggtggggagtggaggaaggagacctctgccaggatttcaaatattaatctctccctgttgcagagcaagctttgcagggggcctgggtaggtgggaggagggaacagagccaaatccccttagccctcaatgcctgtgggctctgggcctcccaggggccacggctctgctgcacttctgtcatgcctctagccagagcaagccttcacccagggggttcaaatgagccaaaggaagtgctgagaacaatggtactttcatgcctgttccttctcctctcttccaccatctttgcttcattctttctcccctcctacagtgttcagttccctgcttgctaagcaccctccaggggcccccagtttctgcaggagatggagcccccttcccactctcctctcccacccctcctctgtgcctggcctagctgtgcaccctgtccctcagacagcctgtgctcctggctgctcctgaccactctgaaggaaaaagtggactaggaagcaatgctgttggagggagctgttgcaaccagccagcctgcctgctccccgcaccaccctctgcctcctgaaagctcaccctgctggtctgggagaaagtctgactttcagaacacaccacacaccctaataaagcttcaggctcacattctccatcccctgcagcacccaggaaactctgctgtgcctcccacctggaagcctggggaggcgtcaatcctcacccatccatttccctccctccacctccccacctccaggaaagctgtgttttccagtgtcatcccagcgtcttcagatgtggtcactgatgtgcatcctccctcataggtgtcctcatgtctgtcttccctttgtgcagcttgtgccctcatcagaaggggctcccaggggccatgttgctggctgatgttgggggcgataattcccatccaataagaggggtgcctgccccaatgatcaggggacagaggcagtgtgaggccttctggccacttaaaggaagcactttaggggctcaagttgtgtggatacagacaggaattctattctccccacacactggggcttagccaactccagcagcaggagaggataggagaaggggaggggaggggctctgatgaggtggggcattggacaggtaactccatccacctgtgccaggaaggggtggccggtgggcattctggacagttcttccagtgtattcttgggagttttattaatacggcccaaattcccataagcatccaacttgttcgctgtgaaagtcaacatatattccaaagccaaccaaagtggtttgcatgctgttcaaccctttggatggcctgagtttttcgatgttccccagttttgaatgacacctgcccagagcaggcgggaggtctggacagtggtggtgaggccagtagagcagggggaaggggaaaggtgggtggcatggcatgccatgccagagacctacctgctccgtggacaggaactttcccacactgtgtcatatgtattgtgtggataagatcaattaagggctagtgactgaaatcacttatggtagcaaaacagccactcaatgagccattagccgagtgaggccttccggctctttaaaggaggtaccttcagagccttcacgctcccagcagggtccaacagagagcggtggttcagcctgggctccagctctgagcacctctgcatctccaggctcatggaacctgaggaagggcagcccagaggaggagaacccccaacctggagcagggctgagctgggaggaaacacatggtccagccccatgcctggcacgaggcagcccccagtgcaatcagatggagggagacacctgtccctgggactttgtggtagctgtcctgctgggggagggctacttctggggctgcggggaggcagccatctttgccgggtatgctgggctggacactgagccatcacagggacccatgcccccatctctgccgtcttttagtgtccagtctggcggaggatagaaacaaggaatcaggcagggacagggggctgtggcagcacctgcagtggcctctcagtctagctgaggcaataggacccactgggaccccaggcagtcacactgacatcctctccagccctcacctcccacatacactccaccaagcttggctgctttggtgccacagttttgctcatctgaactctcctccatccctgcccacttggagtatcctctgtctcctggacaactgcccccttcctttctatctgcctgcctcctcctgtgtctcctgccccaccactgcattctctacacagtggcccaatcagatgctttggtcatcctcacttacatggaagtccaagccttttaccactcccagccctgctgccttagtgcctgcctgaatctcttgctccaggcgcctggcctcatggctgttcctcaaacttacctgctctgggcctttgcactagctgctccctctgccaggcacccccagatgccactgctgctcaccctgtctcagcttctgtgtccctctacccacgacctgtcctgacttccaacctaatgcagccccagctcctccatctgcttccttgttttattttattcatggcatatatcactaccctgattgtttcttattcattatccatcccttgtcacttagagatgagctccgtgcagacagggactctttgttcctctctgtatcttggcaatttgcacagtgccctgcccagagcaggagctcaggaaatgaatggctgaatgcgcaggacagggacccacagggcagtgccataagaaagtgctggaggccaggagcagtggctcacacctgtaatcccagcactttgggaggccgaggcgggaggatcacctgaggtcagaagttcgagaccagcctggccaatgtggtgaaaccctgtgtctaataaaaatacaaaaattagccaagtgcggtggcaggtgcctgtaatcccagctactcaggaggctgaggcaggagaatcgcttgagcctgggaggtggaggttgcagtgagctgagaccatgccactgcactccagcctggccaacagagcaagactccgtatcaaaaaaaaaaaaaagtgctggagcatgggatcagatcacatgcaacaagcaggcacaagggagtgtggtgtgttcagtgaacacctacaacagcagggattatgtgaatggggcccccaggccaggtgtccagggtcagaagtgaaggcggaagaccccacctttaaggaacctcaagaagcatggggtgggggcagtttcaggtctgcctcatgggccagggaagctggagaaggattcctggaaggggaagcttgcaatgatccagagagctggagggtctagatggtgggggttgtggctctgcactccaggccctgggacaacctgaccaagctggggagtatgggcccgggagctctgttcagcgtgggagagatgggggtggggaccatgctggctggctggaccctggagggggaagggaaaaagcatgggagcacagggcagggaatgtgactcactcagcctggctggcttccagaaaaccctgtgcaatcagccagagaaacacatttgagaaaacagaattgtgagagtaactttgaggctttggttgccatgggaacatatctgtaaatacttaactgcaaacattaagtgacacacagggaagagagaggcagcagtgctcacgccgcaggagacagccgagcccgcagtgccagcctctcctggttctcacaccttcctcctggggcctctggcctggatcccttgtccctgtgagcccgacattctgagtgggagggttccacgtggcccaaggctcccatcctgtcccagttctgcccggcccccataccaggcccctgggaccctcactcccaggagcatccctgcccagaggtgactgggccctggccatccctttttcctcccctcacttctaagggatgggccagtgaaacaacatataaacaacatataaatcaagaaaatatttgcaacaagtaggcttaagagacacaaatgtcttgccttctggagcccccagcctagctcatggtctgaggctggcccctgctgcagtgcctcttctggtctgcctctgtttagtgccctcccccatggtgcggtgactgagtgggggcctgggagggagttcaccccaggagccctctctgcctggcccagcattgcctgctcggatcctgcctacttgctcttagcctttctgggccacagatccctttggggaactgaagcagcatttcattcttccattgaattgttccacagaaggttagcaagcacagccacctgccaggccctatgctaagtgctaggtgaccgctgccctactgggacttacaagctagggaagagagcagaaagtatgctagaaccccaaaggaaagccatgactacagcatgttagcagtgttcctggtcaggaccgggccccgcttggctggagcggaactgggagtgaggggagagtagcaggagagaaggggaggatcctatcagatcttgtagactgttgttaagactggattttttttttttttttttgagatagagtctcactccgtcgcccaggctggagtgcaatggcgcaatctcagttcacggcaacatctgcctcccaggtttaagcgattctcctgcctcagcctccggagtagctgggaggtgtgtgccaccacactcagctaatttttgtatttttagtagagatggggttttgccatgtttcgccatgttgcccaggctggtctcaaactcctgaccccaagtgatccacccacctcggcctcccaaagtgctgggattacaggtgtgagccaccgcacccagccaaaactggattttattcagagtggaacagggatccaccaggggccttgagtagagcagtgacatgcactgtctcattctgactgctgtgtggacacagaggacagtcaggaggtcactgcagtcacacaggagaggtggacatggctgggaccagagtggtggctgtcatggtgagaaaagctatgatccttctccttggaagaaccagcatctgcagatccttgggccattttatacacactctcaagatattcctgggccccaaggctcagccatcactccttcctgcagccctgggttgagaccccagcctcctgggcctctcaccctaactctagcagacacctttaatccttagcccattcgtggagctgaggccagcagatcccttgagcccagtgcagaccacagaaggaggacagttaatagtagaactgtgcaccattggtggctgcgcctctggccaagggactcctgcttcccaaacacccaacagtctctgctgaatgcctggagaaggcagcctgctaacttgacggccagagggcacagggtctggcatctgggcctttgcatggcccaggccccaccgatgaatctcacagagattacaacgagcgaaagaagccaggcacagacaactagattaatgtacgaagttttagaacaggcagaaccaaaaagtggtgaaagacgttcagagcactgggtgcctttgaggaacctgcctttggggaccctgcctggaaagggtcatgagggaacttctggggaaacggaaatgctctatatcttcacaggggtgtgggtgtccacatttgtcaaaacttattacattatatccttaggatgtacgcatgtcactgtttgtaaattttatcttaaacaaaaaatagacctagaaaggatgacatatcccagataacgctaggagagtttgctgcctaggaggacctttcctcctggggacagtggtcccgcaccttgtcaagggctctgagccagctgctgcgggaggaccgtgctctgatgaggaatgcatgtgaaagcgtgagaggctgactgcttggataaagtgatcttgcattttaaaagagaattctgaagacagcaatgcttaccccaaagagatgaggctctaatggtgggattcaaggccccttggcagatggcaggtagtggcctcccggtgccctcgccacctgctacatttcactgatagcaggtgatctgcttataactgtgatgggccagggagaggaaagggagggaaagaaaccttatacccattccaccccttccagtggcctttccactggcctcccagttcactgcaccccctgatgcctagcctggccttcaatctcccctgctcccctcttctctccctgctcgctgtcaacatctccctagttgatttctggttgtaggcctgagctgcttgcccagtctggcctcagtctggtgtgttcctcacctggcccagttaaggcctctgggtgggaaaaggctggagtggagattctgctccctggtttggcccttgggggtgaaggggcgtcctcctgttcactgctaacttaccagccccagaactgccacctagccgagactgacagttcaacagcttcctttaggaaacaggaggacatagaatgatgctggaccgtcaatggggcccacagttagggcactggtgtgggctggagcaacaggcagggctgttagcgtttcaagattggggaggactgccatcagcaggggaagggcaacagagccaaaccaggatgcccacaagtcccaaggtgccaggacaaggccggagttgcatgttgtcctggactaattattaatagtgttccctttcaaaccaatgagggtcctgagggtcctggtttgggcaataaattatatggtcacccaacacattaaaaacaaaccggccaggcgcagtggctcacacctgtaatcccagtgctttggtaggccaagccaggtggattgcttgagcccaagaggtcaaggtcagccggggcaacatggcaaaaccctgtttctacaacaagtacaaaaattaggcaggcatggtggcatgcacctgtaatgccagctgtggtctcaggaggctatagtctttctgtaacacctgtagtcttaggaagctgaggtgggaggatggcttgagcctggaaggcagaggctgcagtaagccatgaaagtgccactgcactccagcctgggtgacagggccagaccctgtctcaaaataaaatatgaaacaaacaagccaaaaagatagttgaatggccaagccaagaggcagggatgcctatgggtgtgccaagtcactggaatgaggatttttgtgggggacaaggagaaaggaaggagatagcagagaggaaggggacagggctgagggtctctgcacatgccgaggacttcagagctcctcacagagctcctctccagctgagtgggatgcaccaatctcacactaccacatctgcaagagaaagcgaagacccacacaagtgacaccattgggcacaggtcacacagcctgctgatgaacccaggccctgacccccagtgcagttcctcttcctctcgccgccaatgctggaaagatcaactctaggtttcacctgggtgcctcccttcggatgctgtatgttggagactccccatgcccacaccaggatttcgaatggggatgtgaagtacagatcatattctacccattactaactgtttgattgtaggtgaacttcttaacctctttatgtgcctccatttcctcctctgtaaagtagcaataacaataatattatttctgatgactggtgcattgcaagagttccaaaaatagaagttgtcttcttcccagatgcctccctgcctccagcatgctctgagccctcttggcatggagtggtctctgacctgggccagtatgtttagactcatcaccacttgacacagatctactgctgctgaattcaaggataatttatgtctcatttcaaaaacaaaccccttatctacctgccacccataatcctttcagcttgttagccacaccatcccaatctggattcaagatctgccaaacctgggcttctcaggcatcagccaggcctttggcaccagtgaccactggatgacatctttgaggaaaacaataagaggaaaaggggacgtttgcagccctcctcattcattcgggcaggggcagggatctgggacaagccaagccagcatccaggagaggcccagggactggtgctttcagggcgccccctcctggaggaaggtgaggcacagcttggggaaatgcctcctccctgctttcaagtcagagccccagagacagaaagagaattgcagttcacctacatggtccagaaagacaaacaacacattgcatgtcttcctgcccgagacccatcaattctatctacttgaaaagcagactataaactagcggaaaacagagaagtttaccttctgcatttcttccatcttctctagcaaagaggctggtcttcaggatgggaaatgttgataaatgtcataaaaagagaattaatatccaaacaagtcaaggagatcaaatctggccccataaattaggttgtatttctaggacagagcaaattgagccatggcctcaggtggacaaatgaaacgggtattccactgacagagctgctgcaggtcacttgagacactgtggagacaagaaatggacaaaggtccaagtttttaaaaggtgaagaggctggattctaaaaattagcaggctggcgatcttgaagacaattttggctaagttctagaataaattcatcaaactgatggcttgagagcatttgggggaaaatgatggtgacttaggaaccacagtggttcaccagggtgagccagagcaaggaagctgggtgtctgtgttggtaagtgggtgacccatgcataggagcagggcctaagctggcatcttgtcacctactcggggcagatggcaaagttgcccagagtaactcagagctggctggacagaaagggaggttcctggtgacatctatggccatggcccttgtctctggtaccctcctgttgaacatttttatcaagaacttctcaaaggtgggagacatagaagctgattttaaaatgtgctgatgacctgaaactggtccggaggatgagatgaagggtaatacattcaaaatccaaagacatctccccagcaaagttctcattctagacacagaaccgtgggagtcccccagcctgcccccaccctcacccgtgccacagtggaagtacagatattcaacagcttcccttctaaagccccagaatctgcactccttttgggatggggggtattggaagatttctggaaactttgtgaaattgtttatctggaagttgtcagtcaggtggttggtgggtcaggtggttggctatttggtttgctagttggttggttttagtgatcccttcctccctgacccccatatgtttgatgtggtaaagagataagcacactttggggtgccaggctcttttgagaatctgatggaagctctgaatctattctccaggagaaatagccatagacatgaattggtgctgaccatttcgaagacttcacagtcccctctagcccatcagataacctcttaggataccatagatttctaatagccagtccctgctaggcgactcacctggaagtcattgcacctcagcatgacttggcctgtcccttccttcctgcaggaataaggacagtgatctcacagcctacagtgtctggagtgggttaagtagtcttctccccaaatttgcatccacccagaacctgtgaacatggccttatttggaaatagggtatttgcaaatgtaatcaagttaaaatgaggtcatactggattcatactggccctaaatccaatatgattggcatccttagaagaggaaagaaatttagacacagacacagaacatacagagagagcaccacgtagggatagaatcagagactggagtgacgcagctacaactaaagaaagccaagaattgctgggaaacaccagaagctaggaaggggcaaggaaagaaccccactggagactttagagataatgtggccctgtccaaaccttgatttctgactttcagcctccagaaccgtgagagaatagatccgtgttgctctaagccacccagtttgtggcattttggtatggcagccctgggaaactaagactgtgcccgaaggagcctgggctgaggatgcaggtccccaaggggtttccacaagcccagtgggcccacatctaggcttccacccctctctcaccccaacccccttttgtggggtcctgctggtccttctatccacctgaaccactgccatcagacagccctgagttttgcctatgagagggttacaggccacttgaagagaagttaaaaatcccagcacatccatcataataagttttattacagcctgccagtttagactaatgactaatttactgtataaaataccagcagtgtattttttattttgttaattaattatatcaaacaaaggtgaaatttataaaagtgtccagaaacggtgcacattgcaaaatcaccttgcagcgggagatgaaattattactaacacaggatcaagttattactgtattgacttagttactttatgactttgtaatggatttcttcattattttctcgggattgtggcattctgattgcattaaagtctgttaatctatgcaaatatcattaggcaccactaataaccgcagcaagtttcctccattccagggactgtgctaagtacctggcctgcccgcgtcacttccggtgtcagggagaaaagccaggcaggaggaagttctcctgggacaccccctccacccacagtcttcccaaggctgaatgagtgggcacttctgtggggcgatttaagggccccaggaaggtctccttgccctgagccatctcacatctgcccccacttgcccccaaatgtcaccacaatcctccacttctttggattaaggctttggacagtcttgttaaaatgtacctgtactggaatgaaaaactaattgatgcagtatccaccattagtgcctggaactgacaaggtgttcagtgggagtgtcgtagtccatttgggctgctataacaaaaataccataaaccaggtagcttatcaacaataaatcgatttctcacagttctggaggccagaatgtccaagattaagatgccagcagattccatatctggtgagaacatcttgctgtaattgcacgtggtggaaaagaggtgaacaaactccctcaggcctcttttttttttttataagggtgctaatctcattcaccagggctctgtcctgatgatccaatcacccccacaaaagctcctcctcttaataccatcaccttggggtttagaatttcagcgtgtgaattttgggagggcacacacatccagaccacagcagggaacacaggccttgctgtgttgggacaaggaactggtcagttccacgagggttagaaagaggctgaatctgattatgggtatagtagagttggccaaactcagatgttctaagggacagctgtggaccctggagacttaagagggatgtccccaatgtggtgggacagaggaggttgatgagtagagggaaccaccctgtgagcagctgctgaaaggattctacaaatcaaaaggattctaaaaacccgtggcctcatgcccaggccctcaggtcagccctgcggcagtcctgatcatcccattctgtagctgaggagagagactaggctgaacccctgccccaatcacagggctggtgggaaaccaaatgcaagcctccagccgttaaatccaaggtgagtttcacattttatcttcgctgaaggcagaccctgaccacaccagggtgcggggtagaaagagatgcatatgcaggtccaggcttcctgcccaaccttgagctttctgacatgaaccctcctcttgagtacatgggttacagtcactattcattctcacagtgcttcctgagcttgtgttgtgaggcagggatcacactagggcctcccagcagtgggaagatgcacagctcccagcctcacatcaccagaaatgccgactcatgttcataactgaaaattgccaggcacggtggctcatgcctgtaatcccagcactttgggaggccgaggcaggcggatcacctgaggtcaggagttcgaaaccagcctgaccaacatggagaaaccccatctctactaaaaatacaaaattagccaggcatcgtggcacatgcctgtaatcccagctactcaagaggctgaggcaggagaattgcttgaacccgggaggcggaggttgcggtgagccaagatcatgccattgtattcagcctggacaacaagagcaagcaaaactccatctcaaaaaataaaaataaaaataaaactgaaaattgtcatggatcatgttgtagaggaggctgaaaaggctgatggagaaagacagacaggaggaggagaagaggggaagacacagctctcagtctaggcctccaggcaatcattttcactcccttggttattactatcttagtcgaatcaaaggataaatttgaagattaggcccagaggagggcagaaactgggctcaggttgtagtttgaggtgagtttactaactataagtctggggtggtccctgcttccctcccaccacaatccttccctctagataggtaatgtgcgctcttgtgggtgagatgcgctaggcctggaattcagctgcggcactttctcctgctcaagctcccgctgcccttcttggatcagcatttccagacttctcaaggttaaggagccatttttaacatcaaaaattcatcagtgccccccttgacagatgttttactttgagtatccattgtttgagagaatgcaaaatgacaaaactccaccttgaattcagcaacgcttttaaatggatttgtatttttaaaatcacaacatcatctagatgcatttgaaaaatagtcacatatacctgtggatgaagctttctgatgcagccagcagacaaagcttgaggtgcctgggacccatgttcagggggctccactgccctgggccatccagctgctgtgcatggacagggaaggagagttggggctggcagggaacattccctccagcccagccaccttctttggcctccccagctcagcaccatcatcactcacctcccagacaccaggctgcccttaattccccagcatcaagccctctcccagccatgcccctccatgctgcctcctccacttctcttccattctcaggcactcgaggcctaaaagcttatcagatccttgtgatcacaaaggacactttctggcaaaatcagtcatgtggaggtgaccagagccaccacatttcaaaaacttccctgaagagggcaatgcccagtctgcaggcttagaacccaaaagatgaaactccagggctgtgtaatactccatgtcacacaacagagaaggcggtgcagccaccagagatacccggtccagcctcacctgcgccacttactgcctgggggagcttccaccagtttcttagcttgtctgagcctcagttaactcatctatcaaacagtactctcatcatattctactggaacatggtggtgagaagtggacaggatgtgtggagatggccagctggcacagagcccactgtcaggacatccaaagggcagctgacagtgtccctgatagcagagtctggctgtgggggaagggaggtggggggacgagctggggcgtactagctagcaagcgggggccttcacctgcttccttcactcccagaccacctgctcctggcagagcagccccacagtgcttgtcatccccagaatcccctggagacttgtgggtgggaggactatgtcttgattttcaaaatacaattctggagcacttgagctgagtaacgaagctctttgcattctgtcctctgagctcccatccccaagtttccatccttctccccacccttccctagagaggcagtgcagcctgacctcagtatcctgtggcctcatccatgaggacactgcagcatggcaaactcttcctgctgctccaccgtgtactgccccctctgccagcccccatcccttctcaccccacgatcccccatcatggtctgccctccacagctgggccgctcaggccctaatttggaagcacttttcttgaaggatcaagtctacttcctgcatctcctgacacagtcccttgtgcatagtttgttgaatactgactgccggactgagtggtgaatagcaggagaggtccagggcagccccagagctggcgtgcaggtttctgagacagaaaattctcttgtgccactctgttaaaggaatttcacggtaaccaaatattgccacccttaagaggcaatatttctgttctctattctctaacaacagagaacaggctcctctgttgttagcaatgccagtcacataccaacagataatatgttgccacccttcaaaatggttggttctctcaggaaagcaaactctccccctcacaatctcattagtcattagaaagaatcaaggcttgcagatggtgcagcccttccaggtgcccagagccgcctgccctcctgagctcagcagggcctcatgaccatcctctggtgagcagggcagggggatgccttctgcgtgttagatgagagctggagagctgggccacctggttcaaagtctggctctgctgtgaattagcttggggatccccagcaagttggttgccaagcctttctgtgccttcgtttcctcatctgtagaatggggaacagtggtgcccacttcataaggttaaagtggtctgagctgtgcttggcccatggtgtgtgctgccatcatcctctctgagggcatggtctttgaccaagagaatgaatgcatggagctctgcataaaccatgtgggccaacacctgccgtctcaccacagggcttaggagcagtgctcccttaggagcaggcacctataagggagacatccctccgcgcaggaagggaggacctcattaggtgcagtggaggcttgagaggtcatttcagcctgccagtaggttcaggaaaacgtcaaagagaatcttcaggtgtccacagtaaaccagccctattgaaacctatgttaactgcaaacccattggcaaatgtagagatgcagggacctgtgttgaaagagaagctggttcaagataggtcttgaacagaagagcattccttgttattttgagagtcagcaccccagcaggtgtgggtggttgtgactgattttctgacctttgcatttagacctcattacctgaagtcctcagaagcatcctggccacccatccatccacatttacctattgctatttatgtgtcatccatcataaatctatctgctttctgcaatcatttttctttcatctgtgtatctatctatcatctaacatttaatctggatatctagcatctattaatcatgtctaccatccatccatctctatgtctatctgcagtccattatcagtcatgagttaatacaccgtgtacttaagcatgggccctctgagttccttggggtgggcagcagggaatccaggagggccatggtggctggaacaaagtggaatagaaaggaacccagaggcctgagaaacaggggcctgggattccccactcagagcagggctggctggtggatggagggggaaggggcacaggggaagagagaggaggaagaagagggggcttgcaaagccctcaggggctaagccgcgtgctgacctagagaggtcccctcaccccgcctcccgaaattagttcaacagctttacagggtgactcctgagcaatgggaaggatggccaggctcaggcatgtgtcagggcatagaaggtgggtgctgccatccctgcaccaacagggcccagaattttgcagtctgaagggctctatcccagcaggcaggtggagggccagggacgcagtgcctgaggagagacgagcagcctggagaagaccaatcccattgcatcccttccctgccctgcctgcatgttggtatcacctgagaagctttaaataaccaaaaccagaaatactgacatctgggctcccaaccaatccctcaaatccgtatctcgggggccagcccgagtcacctggcttgtcgaagcctccaggtgatttccatggcagccagggctaaggacctctgtcccatgagatctaagacacctgttgttcatccctgaagggctgtcctgagggcgcaggggcagccgctggtgctacagggcaggacttgggctctggaggcacataagacaacgttcttctgggctccctcctgggtctcgcggggaggccagcaggccttctgcaggtgatcaggaagcatcattcctgcaactgggtggtaatggaggaggctgggccaggtggcctctgaagacccactcccaacccagggtcgctagaggttctcggcacagtgttcaggtgtggggaatgggcgtggtggctgcagccgccagatcagtctctcttcattccagtgtgactcctcccgggttagacaagtaaggaggatgctgaggccttgcacctccccgggaagatggccagtgggctggtaggcagcttctctattgctgttcatccacagaaagccaagccccactgtcaatattaaaaacgggctgtgggtcagaggggcagggggtttgcacggccgcccccagcactgagtttttcactgtgtctctggcgatggcgggaggcaccgaggaggcccatgcccactcaccctctctgtgcgactgtggaaatttgggtcacagctgggaggatttgaggccccataagggtcagcctgtggctaatgttggaaagtctgtggccaggtggtctgcaggcagcgaccactgccccacacacagccttatcactgtgcagctctgcgcccagctaacgagcccccgctccatggttaatagagacaaacagctctaagtgagtcttttatttcttccctagcatttgtggccacctggagtagattctttgccctgtcaatgagaagcttttaacaccattccttggtctctcctcttcttgcccctcctgccctgtagaccaccctgtcctcctcctcccctgcagaaacctccccccgcccatgctggaatagccctgctttgtctgtctccttgaaagccgaggacaaactggccataatttatgctcccgcatgatgtaaaggaaaaaaaagccccattatgttataaattatcctgcgatgggtgaaatgcaggagagtgtgccagacgccagcggaaaccccattagacaacagagttcggctgcgaaaagtccccacagaactccagggccgtctatcgtgtgccgtgcgcctggtaaggataatgtagcagatcaaatgtataatcagttacctggagagatggctgcgcgccaccaccccagcaaaaggtgacttctacatagagccactgtggtgtcccaggctcctgcagaaaggcctgactcaaactcacagggcaagggtccgaaggccagagagggaggcagcaagggggcaggtggggacagtccccagacccctcacctgtactgaatcccaaggctcagcttctcctgattcagggtccctaggccagctcatctcctctcagagcgcaagagatgagagtgaaggagccattcctggccccccagagggtggaatgaacagacccaagttctggctctggttctgcaaacatactgcaagcccctcaaaggcacccctacaaacccctttctcaggtgccacacctctgcccagaacaggccccaggggccaaggacgggcttcaggcatggagggggtagtgcagttagaggagattctgccagcagggcagacttcctgcgtgacgacgagagaggacattttcagcccacattcaagggaggggaaggccagaggactcaaaaggaaaaactttacctcctcgagcacctaggagacttcaagacaggcaggctgtgatcagagggatgggcaggactggggagggactgtgaggcctaactgggaccccaggcaatgggaatcccatgagcccactcccttgcagctagcagcaggctatgggtgccccacccactcaccccttggggctctcaaccaaagccctagctctcaaaaagcaatgtggttattgggcattttgccagtggtctgtgcagagatggaggggtggagagggaagagagggagtgagaactccaggcggtaccctcctctgcctggggggaaaaggaagaccctcaaagctcagctcggtccagaccacctggggctgagtcctgccttcaccagtgactgggtgtgatttcttgggaaagatatttaacttctctgtgcctcagtttcttcatctgaacagtggaaataatcaaatacctgccatacctgtaaagtgctgctctcagtgtctggatcatagtaactgggggcgaaatgagaaccattgtgattcttcttgttgatcttacaaccaccacctggaggactgagtcagagccgcagccatgggcagggcatctcaagctcgggggagggaggtggcgttgactgggctgagcagtgctggctggggcggcaggggttctgtgatgtgggagttgggtccttcaggctcttgtcannnnnnnnnnnnnnnnnnnnactcaccccttggggctctcaaccaaagccctagctctcaaaaagcaatgtggttattgggcattttgccagtggtctgtgcagagatggaggggtggagagggaagagagggagtgagaactccaggcggtaccctcctctgcctggggggaaaaggaagaccctcaaagctcagctcggtccagaccacctggggctgagtcctgccttcaccagtgactgggtgtgatttcttgggaaagatatttaacttctctgtgcctcagtttcttcatctgaacagtggaaataatcaaatacctgccatacctgtaaagtgctgctctcagtgtctggatcatagttcttccggtcgtaatgatgtatcgatttattcctggattggagtttacaacacggcaccatggataggaccatgtataccgagctcgacacttcggcaggccatttggaagattagaggggaggcaggtgacgatgtgattgacttgtgcactcctgggtagggtccacaaagggtttctgtgatctgcgacgagagtctgttcgnnnnnnnnnnnnnnnnnnnngatggaggggtggagagggaagagagggagtgagaactccaggcggtaccctcctctgcctggggggaaaaggaagaccctcaaagctcagctcggtccagaccacctggggctgagtcctgccttcaccagtgactgggtgtgatttcttgggaaagatatttaacttctctgtgcctcagtttcttcatctgaacagtggaaataatcaaatacctgccatacctgtaaagtgctgctctcagtgtctggatcatagtaactgggggcgaaatgagaaccattgtgattcttcttgttgatcttacaaccaccacctggaggactgagtcagagccgcagccatgggcagggcatctcaagctcgggggagggaggtggcgttgactgggctgagcagtgctggctggggcggcaggggttctgtgatgtgggagttgggtccttcaggctcttgtcatgtagggcctgggtgacgttgtgttgggccacaggagcagccatgggtgccgtggatgaggaaccagagggagccaagggagggcatggtgcactgtgaggccaggcgcaggcgagaagaatgggcccagggttggaggcccaggccaggctcccagaggtcagaggagaggggccaggccttttgccttggggaggtgcttagatcagggtgggtgggagaggaggaaggggtgtgtgtgtgtgtatgtgcattggggtgtgtgtctgtgtgtgttatgtctgtatgtagaggtgtgtgtgggtgtatctgtgtgtatgtgtatgtgcatctgtgtgtgtatgttggtgtgtatctgcacatatgtatttgtgtatgtgttggagtgtatgggtgtgtgtatctgtgtgtgtatgtgtatctgtgttgaggggtgggtgctggtgtgcatattggtgtgtgtatgttagtgtgtatgtctatgtatgtgttggggtatgtgtctttgtgtgttggtgtgtgtgtgttgggtgtgtgtgcatgttgggtgattgggtttgtgtgttgggatgtgagttgggtgtgtgtctatgtatgttggggtatgtatgtgtatatgtgtgtatgttgtgtgtgtgtgtgtgtgttggggtgtatgtgtggtgtgtgtattgcagtgtgtgtgtgtgtgtgtgtgtatgttggggtatatgcatggtgcatgtattggtgtgtgtatgcgtatgtgtgtgttgggctatatgcgtggtgcatgtattggtgtgtgtgtgtgtgtatgttgccacttcctcctaccacacaccctttcacactccctgcttttgcacgtgctgttccctggcccgcagtgcccaccccttgcctctcccacaatgcaaaccctgcccatggatcattcagggtccagcgcaggccttttaggtctttctcagcccctcatacctacagggctcatcactccatgctctgttcccgcagtatgtccagtgcctactcatctccagggaacactcatttcctaccttctgaggattcctgaaggtcagctccttgtcccttgcacccatcaccatgccagttttatagcagccccacccccaatgctcattgagcaaatggattcatttattcatggcaacatgtatttattgagcatctactacatgcccggcgatttaggaattggaccttgctgcatgaatgaatgaacatggacatctcattcatggaggagagaggtcagagggcatggagtgtgtgtgcctgtgtagccccttacatgatattaccagacttggcttgttctcagagtgagggggagccaccacagggtttcagcaggggagagacagggtctgccctggattttaatgcccccctctgctgttttgtggagagcagacagcaggggcttggtgggtgtcagcaccgagaaggtgaccgtcatgcctgggtggctccaacctcagggtagaaggaggagggatggcagaccctgaagtatctggaaggcagcgctggcgaaggagtgcaagtgacggggactccagtctcctgcctcttccaccccaacatcaaacagcaccaggaccggaggaagccaagcagatcaaggccagcactgcctccttgggggcggggaagagcaggtgagggtcttcatttgcatcccattgcaggcccccaaacacgtcctgatcccagcagcctttgatctggtttgatgtctcctccagccttcttcccaagcaggaaggcttttatcctcagaggcggctcccagcccagctggctctagcacagtgcagtggagggaaggggagtgtgtagctctccactggctcaggctcagagccatcctgagacctggcccgtggtgaccctgtgtctcaggtgaaggaactggctctcgggaggatggccagcctggtcacatagctgcaggttcttgactccagtgtggacagtggtgctggaaactgtctgcgccgacctgatcaggggtaattgctgggttctcagcctccaaggatgggagtgcagacccctgtccctatccactgcatccctacttagaaggcagttctgctgctgtatgctgccccctggggcagtgaggtggctctacaagggctggcaaaggggaagaaaaggaagcctctgggttttggggtggagtggtcaggcaaccttgaaaactgcacagatgtagattcagatgagttgcttgtcccttaggaaccatgggtgcttgacagatctggattgggagaattcatggaaatgccatgtagggatgctcagtacctttaggggaaatgtctgtttttgcacaacccatgtagacctcctggtggaggctggagagcatctcagtggttctcaaaatgctgttggcttctctgactgacctgggctggcacaactttgctcagtttgatgtccctggtggtcctctctacactcccaggggtgggagtgggcatcaccctcctgccagctggggttcccatgggtgagcagtagtaatggttacaacattcacaataactggcacttattgagccttttctctgtgccacgcacgtgctaaaaacctcatttaattccagacctgcctggggagttatatgccttgcctgagcctgcacagccaaaatgtggtggaactaggatttgacaaacagcctcagttagtatctggaggacaccattggcctggccctcctgttgagtcaggtgtgtctccctgtcccttgctactgaaggtcctccctgatccacaggtaaagttagagaggggggcatgtccttcaccctcagagtcactgcctgcgggcccagagagagtagaagaccctgggatccaggaggcaccctgggggggccactgcatgggatgaccctgggctccagactctgcctggcagctgaggagcagattcatggggtgctctggtctctgggctcttgcccagtccctgtcactccccaagaccaaagactccaaagcaggaaagaggcctccagctctgtcatcatgaatatctggcattttctctgcacccccaaactgctgcctttgagcctccaggtctcctagcagcctctctgcccaccccaccagccactagacctcaaagccatgtactccccaccctggtccctgaccccagcattctccccagctcagtagcccccaaccttccttcagcagctggagggaagagaatagtaaaaatctactgcggtaataaaaggcattaaccatctgaacactcgcccacagtgcccctgcaaccgtctatccttaagcaagaaatattgtttaatgctgatggtaatgagtgaatcaaattgtgaaaattaaactggaatttgagcattagtgccaggatgctggcatttggcgagtcaagtggtagtgctgttacctccctcctcaccactcagaggcccactcaccctgcccggccagcaagatgcttcccacgtggctagggtggggcagcagagaaggcacagccctgaaacatccccgttaggggtttgtgctaatcctgaggttccactgagggtgccctgggctttccttttaaaatacaaatcctttcagcccgagccccatccttccctgataccctgaatacagtgagctcaggagtttttgtctccctcatggagggacccatgggaggatgcaggaggttctggcagccagattccattgtatttccgttagcacctgtcacttccccgggtgtcacccaatgctttttataggttgtgaaccaaagctcagagttagactggggtttaaggaaaattaaaaagagtcctgaagtcagaggaatgggtgatgtatgcgttggtggaaaggaaagcagtcaggaggcaggtgaagaagcaaagtcaagcttcctcagcgtccccttcttgcaaagctgccacaggcagggaccacttggagcaggtgaaaagggcagccgaaggcgtccctccacctctccacctttgctcaaattctggtgtgggcttgttgtccctgcatatgtcccatgcacttcataactccagcccacctcctcctggaagccatcagggtgtagctagtttctcctcccacttctagcctcttctggccttcatcccagagttactgaatgtatctatcaggcctttgttctctcatcaggggctccaatgaagaggctctgggcccatagaccaaagactctggactctccagggatctcagagccatgcacaactctttcttcccaaccccttaaaagagaaaacccagaagtgctcccaaaactcatctcagatcctctgttctaacaattcccaggcacacagtgagtgctcaatcaatgtttgctgaaggggcagccagaggggagatgcaaagtcaggggttttgtccagcccctcctgaggtggctgtaagcatcttcacctgacacagaactggaagcttctcctgtccacagttttatcatcttcccccagccccagctcctgcgcaggtggggtggtgagtacagactctgcctactcccctatggtggttagacatctggggacaaagagccaagatgccctctctgggtccaagcggggctgggatgagcacctacgtcctgttgcccagccctctggggagtcacactcctgttccacagaaccccagatgctccctcacacctgcaggcacagacacgatttaaaagagcagatggcagcagcaagggctttgtgatcatgaaatcaagggaccccatgaggctgggttgagtctaggctccagctatgggcaacctcctgtgcatcctggggttccttctctgccccagcttccttatctggaaaagcatgaaacccttggtgttatccggggtcctgcccagctctgccactctgtggccttgttcttccaggtgcagggacagcagttcttggggccacagtgtgccagccctgctggcctttgtcttgtttggggacttgtgtattgtggatggcctgtctctccacccagatgccagttccaacgagcagcttcgtctctcttgtttaccactgtagaagcaatgcttggaacagagtccggcacagagaaggtactcagtgaacagctgttgagagactgtagaacatgcttgctccccttgctctgccccttgaccaggaggaacccgtgaggcctcagtccccgcagctcaggtcagcggattttgttgtgctcactttccaactcccagggctgagcccctgacctgagctgggctctgtcaagagaattctgggctcctaatgccagcctccagttgctcaccacatctctgggcccccagggggtctcagcaacctctcactcactcttcagcccatcccctcactaactctgaggccactccttgcctcaacaccttggcccagcccagcagcacctgcctgaatgtgtcttcagaggggcagctccccaataccccgactatgggaagcaacaggctcagggctgagggctcaccagaacatggggaccaccagagcctctccattaccaggggtcccagcttaggcagctgggcagtggccagggccttctctgcctgtaccaggagtcaggggctgtgtggatggaggaggagggtgggcacgggctggggaaacagagtcattctccaagactcttgcgaaactggcatcagacccaagacaccagccaaatggtaccgttggttatgtgatgcagcttgagacagtgcctcaggaaagcggacagaaaggaggtgggcagagtgggtgggagacagggagatgttgtccatctcagctggccagccacagcctcaggatctagtccaacctgttgcttcaagtgtgttccccatcataagatgtggctcctctgacttctcctctcaccctctttgacctctgccctctcacagcaggggtgaccttccaggccaaaccaaggcagggcgaatgaagggaaaacagcactgcatttcctcttcctcctgcacggagaaacccaagtaggggccatcgccatggtaattacctcttggcaggcgctgggaccctagccaccaccatgacaagagcatctaatcatacccatttcatagatcccaaaactcagttgtggagcaggggagcgggagggggagtcagtgggcctggcccacaaggaagtccactcgcaaactcaaagtccctccagcccctggtctgagagacaagccttagaatcactcgcacaagccacaatacccaactggaggacggtgcaaactgaacacatttgaggatcctagaagcagacatttgagttggttgtggtcaatccatgactacctggaggaagtgagtctgaagctgggtgtctttggtatcttgcagccctccagaaaggtaagggtggctatagtttccctggggaaatccagatggggaggaagagggggagcctggcagcttatatgtttagaaaggcctctagaaggaggcgcttaactgagaactgcacagtaaaggaaaatttcaggggaggggaacgaggaattaggaaaaaacaaaaaaaacccaaaaccggcaaaaaaggaagtggctggatagaaaggcacatgtggatgaattttaatgcaatcagaaagctgtcatagcaataataaaggaatgcattcagacgtcaggagaggcgaaggcgaggagctgcagtctccgcatgtaaatcaagcttgggcagaggaggtgcgttcccttcctttcctttttctgtccaagtgaggaagtggaatttttagcaagagggccagggattagcaggggcggggttccatttctaagtctttctggaaacccaattcgattgagcctttaaaaggcactaaaggttgagggggaggtagggagaacactgggggctgtgcctggaaagaagagttttaattactccacaaaagaaggaaaagctcccatttcacttccagtaaattgctgttgctgcttccaggagtcaaacataatggctccctagtctttcctctgtctctgccatctttccccccagccctcttctcccagctctttgcctctgattctcttgtctgtgtttcctgccattttctctcccccactccctttctgcgctgaactctatctcctcccatcccacttcagcttttctcttccaccctccctctctctcttccttctccttgtgccccagagcctggagtaagtgggggagggctgcacgcagaaccctggagatggggtgggggtgtgccccaaagtcttgccaagccaaaggagccagaagagcagcttgaggcaggtagtggggcctgggctctggggtccagagctttagctgaggcccaccctgttggagggccagctggtgttttttgacgaacagctggtaacagggaccagtaactgtgccctacaggttatgcgaggagctgggacctggtaccacatcatcattgagaactggcccagtgctgagtgcgtctggactgaggagtaccagcagggcagagggcaggaggactctgcaggtggcttgtggagggcaggggcctgaaagcctcctctgctttgcttcagaacctgggacagaccctcagctctaagtgaactctcctgacaatttgggcaaggtgggggttctctgggaaagaaggtaccaaccaccttgaatacagaaggacacagggtccctgagtgcccatgtgctcagaggaaaccatgaacacatggccatttgcagttttggggtctgcatttctgcagctttggctgtgtgtcaatcatgtaatcatccacaaacatctagcgagtgcctgctgagtgcagccacccctgggactctgttccagttcctatggctgcataccaatttagcccgaaactgagtggtgtaaaacaaccatttattttgctcatggattccatgggtcaggaattcacagggcacagcatggaaggcctgtctctgctccaggatgtctgggcctcagctggaaaattcaaaggctgggagctggaattatccgaggactcattcattcacgtgtctggtggtcgatgttggctgtcagctggggcctcagttcctttccatggggactcttctgcatgggctaattgggggttcacagcatggtggctggcttccacagagctaacaaccccccaccccacaaaacagaggcaagtggaagctgatctcttttatgacccaacctcagaagtcacctggcatcacttctgccattctttatttgttagagcagtcaaggggaaggaatacgcccccggactctcagtgagaggagtggcagtcacactgaagtagcagtatgtgggctggggctgccttctgcagtcattcaccagctgctgcaggtggatacagccccatgcgtgcatgctttgtctccctgagcacacagcatgggatcaacaaagcacctgatactcatcccaggtgtgtgggggctgctgaggcatcttcaggaacagacgcccccaaagtgtccagggtcgaattttgcagcgtgaagaaataggaagagccagaccgaggagggcgcatccagatggaagaaaaaatatgtgacataccaaggaggtgtgccctgggatggcacaggacaggcagtcattcattctttattcacctcatcactaaatggagggcctcctgtgctccaggcactgctgcttcagcagagaggcctggtctctttccccagtgagcatcccagggaatgggtgggaaaggagagctatacggaaacccacaaagtagtcattgtcctttgacattccggccacagggatgggggcctgagacagagtaagggagggataagaaggggcatgggtgaggaggcaatactcaaactgagacctagaagaagaggactggaccttgtgataagtgcgctccaggcaggggaacagcatctgcaaaggcccgaagtcagacccgccagttgtgattcattttggagcctgtagaggatagcatgtgagacgaaggaggaggggaacgcaggctgcccgtgtgctctagtgaggggtcagcccagggtctctgctcctcagggtgcagcctgccctgcaggcgggaggaggccgagtcgctgcgatccagctcctgcctgccacagctctctccgcacctgtcccgcgactgtgcgctcctaccccacctacttctctccctcgcccctcccgctccgactaagccccgcccccgtccccctcccccgcacctctcccccgccggctccgagcccccgccccgcctccccggctcctccctttccctgccgctctccccctccggccttgccctgctcccgcgcagcccggtccctggcccgggtaagcatctcctaattttgttctagaagatagaaaactcttcgtgggcatgctcaacaagcaacagtccgaggacgacgtgcgccgccttttcgaggcctttgggaacatcgaggagtgcaccatcctgcgcgggcccgacggcaacagcaagggtgcgcggggcggggccgggagggatgccccggagggaggggcgaggcggagggagaccagagggctcctctgagtctccggggccatcgccgtctgtctctgggcttcttggtgtctctttctcaatctctgcctcacccgtctgcgttcacctgggatgcgccctctcctcccggcccctccctggccctgcttctgggtcccagctcggcctctcgcgtcctcgcagggtgcgcctttgtgaagtactcctcccacgccgaggcgcaggccgccatcaacgcgctacacggcagccagaccatgccggtgagtgctggccccttggggcgggggcgagggcagcggcgggccgagaccccagcacccgccacgccccgccggctgtccagtctccccaagagacaggaaagcatgacccttattccgggcctcagacaaggacgcggaagcccagggatgttaaggaactggcctgaggttacccaggtggaaaatgcccgcggtggggttcacacctcattcccctgggcgagcgccgatgccgcctcctccaaagcgccccgaggagcgggcggggtgggcgcaggccagaggcaccgacagctgcgggcggaggctctggagcaggtgggtctcacgcgccgccccggccgcagggagcctcgtccagtctggtggtcaagttcgccgacaccgacaaggagcgcacgatgcggcgaatgcagcagatggctggccagatgggcatgttcaaccccatggccatccctttcggggcctacggcgcctacgctcaggcagtaagtggcagcgcgcacgggcagcggttctcaagctcactcccctgggagcctcagagagcgggacatgaaaccgaaaatactactctatcccttgccctctccctccagagtgaggaggggccgggaatgaacccatgaacccggggggtttaacttcagaagggtttgaaagaaggctggcccagttggggtggctgccaggaggaggtgggctgctgtcttagttctaaggggcagagctgagagaggccccacagaaaagtgggttaccctgagccttttcctctcagccagatcaacgttgaaccccaggaagcacagatgagagggtgaggttcaggtcattggttgcaaaccacccctactccatggaacggtgacttcaggccttctggtctctcctggcagggctcctgtgaggtgccctaaagccctacacacccacacttctgatatcccctcaggcctctggcccacctacttctttcttccacatgggggcccactctgtcagcctctcccggagctgcctgcagactggtaaccacagctcccatgtgggtggcactgaggcaggccacggttctgggtctgaaaatgcaagcttacctcacttctgcagtactgtccgccttggccacattccgcagcctcccctgtccgcactcacctttgtgacaacactaggggtgcctggggttctattcataattctcctgtcacttctaccaacagactccaaattaaaaccattctggacagaaacctgtgctaagtgagttctgcagaggctcatccagcatgtctctagtgctttggatgtcacttccccacgaatgacaggctgtacacagggctgactagcacccacagagccagtctcctcctctgcccctagcaacaactttggagttccaaagaccctagcattacttttaaatacagtcatctctcagggtggtggactctaatagctgttgaggtacagggcaagaatgggagaggcatcagggctttctggagtggtagttgggagcttctggggctcagagcctgggagattggtctccaggagctgaggcccctgtcggggagggatgccccctggaagcacgtgatattttttccactccctctgccccagctgatgcagcagcaagcggccctgatggcatcagtcgcgcagggcggctacctgaaccccatggctgccttcgctgccgcccagatgcagcagatggcggccctcaacatgaatggcctggcggccgcacctatgaccccaacctcaggtgagctggcaggtgccaacacgcggtctggcccggtgggagaacagctggccccaggctgggacctaatttcagctaccagcggaccattctgtggcaaaagcacatagtgtctgggcccgagaggacttgccttctggcagtttgtctcaaaaatgttctaatccatggggatccaagggaagatgagatatgggacccatgcagtctaccgtgtgatttcagggtggggtggatttctctcaagctgtttaaccttatcaggaaacaatgtatcttgatgtttaccaacaagagacctggaaagaaattgacatgaagacatctccctgtggtgtctatgatgagaagagccttggccattctgtggccttgttcagcccctggcccaagcacagaaggaacccatttgggtgtcgtcttttttttttttttttttttttcatttccctttaacccaatctagactcactggctttttctaagacaactatgcaacaagctagagagaaccacaagagttatcaagggacaggagtttggaaagaacccagctcacaaatcatgtttttgattgaatcttggctattgtccagtccagtgagtctcagctgttgcagttatgcccccgaatccccaggacatctggcaatgtctggagacatttttgattgtcacaactgggagtggggattgctactgaaatctagtgggtagaggccagggatattgctgtatgatcctacagtgcacaggacagccaccacaaggaactatctggccccagatggtaatagtgtcaaagttgagaaacgctagtctagtcctaagggctggtcctgcaccccaggctcttattcactgagcttccttggctctctgtgcccaggccacagcagcaactttcctaacatccaagagctgttcctttcccaggtgaaagccaaaaagactgtgccatctctgggctcaacttgaacactactcttcacctctgatccccaacttcaagggatacacatgagcccaggcagtggccaacctcaggtccacattctcagagggaccctgcttcctacatgagaggaaggccctttccagcctctgggctttcagtacaatcaccataatatccacatctcaggttccacccacttggcatagggaggacacagggtattgtcatttgaccccaactttattctcaccatcatgaccactactattgcttcaagtggaggaggccaaggtgtctactttgtgtatgagctaaagctgagtctgggctctgtaataacctctctgcctcagtacgagagaaggccagaattaagacctactccatctgagcagaaaaacttcctcctggagaggcatatcagccccccaatgaccaagtaaagaccagctcatccagccttagctgaagagagtaagagcactgaaaaagacttaaggaaggccaggtacggtggctcatgcctgtaatcccagcattttgggaggccgaggcgggtggatcacttgaggtcaggagttcaagaccagcttggccaacatggcgaaaccccaaccctactaaaaaatacaaaaattagctgggcctggtggtgcatgctggtagtcccagctacttgggaggctgaggaaggagaattgtttgaacccaggaggtggaggttgcagtgagctgagattgcaccactgtactccagcaacctgggcaacagagcaagacaaaaaaaaaaaaaaaaaaaaaaaggactgaaggaagaccaagtgtggttacagtcaagggcactgagagtagtctatgtgctgtctaaggacaagccatcagggtcagagaaatcttatttgggcaggtggaatttggagtctgccttgaaggatagatacaattgggataggtgaagtcacttcatatagggagataagccaaggcatgggtcatagataagattgaactggtatgtgaggtccaagtctatccgcaggtccttggaaacagttgagtgaagctttatgggtgggccttcctcacctttgttctgcttgcctcccctcctcctccacccttctgtatgcctggaaccaggtggcagcacccctccgggcatcactgcaccagccgtgcctagcatcccatcccccattggggtgaatggcttcaccggcctccccccacaggccaatgggcaacctgctgcggaagctgtgttcgccaatggcatccacccctacccaggtaagcacatctgtcagcacttatttccgtatgcagcacattctttatccatgctgtccctgcccttgctgttataacaagatgtggctcctgccctctgtccattccttgatgaaaccccaagtgtgatcagagagggccagcctcccatcttccttcagggagcccgtgatggaaaaaatgagaccaaaatcctgcccttggggatatgtcattctgatctgggagacagatccccattccaggtgctcccttagggaagaaaggagactgggtgcagttgtacaaccatgtagagaggccagtaagtgcaaaataattgagtgtgaatttaacctacaagaagtaaggggatagaaactagaagaacaatcagggttagtgttaagtaggaaaagactctttgggaaggagtggagggaggtataacgattggcagtctgtctagtacagaccagtccatcccttggtgcacacaaaagcgcgatcatggtgcacgcaaagcgtgatcagcaccatggacaggtcagcaccacagacagcccagcaccttggacagctcctagactattttttcaaatagtctggcacacggaaagatccaagaggcctgctcctgattaccttttttcctcaaacttagccgtcctcacagggtgagagtgtccagttggcctgaagcagctcttctccctggtctggagaatgggctgctatcagggcagggaagctgggcccaaagccctctagtaaactacaagggaaatgtgctcccgatgtggagtgccgccccgcttcctggaggcagaggatgaggttagagtccccgtaagtatcagtaagtactcagtttgtgctgtgaaaggggggcccaagaagtagagcaggacatggacctatcgcctgggaggtcagagtccattgggaacacaatctaagtctgcagaatgatgagacaatatggcagaattaagtttgatcatgagtgagtgttctcagacttgaaatgctaaagatcccaatgaatggacagttctgtaggctaaagaagccccaaaaagccttcccaaggaggaaactaccatcgagcattaacagatgggcaggaattggagaggtgaagatgaacagggaacaccctcctttggagggacctgcctggcaagagtggaggtggtaaggagattggcacacacggcaggcaggccagcccaaggtgaattggcagcaggggctgggtcctgttccccactctgggtgcccatcagaatccactgtggggctttatacaaccacataagcccagacattctcatttccctgtctagagtgcagaccaggcatttgtagtatataaaagtcccactagcagcagagtgcaaggtcactgtactagagggaaatagaggagaatttcctgactttgaacttggagttttccttaatcccattccccattccagagcttgccccataatatatccctcaatccaccaagaagaggccagaggagtctagagagtgaagtgatgaggctctaatgatctggagtgttgtttaaggatgatgaccccaagctggtagggtggcagggtggggctgtgcaagctgggggtggaagagatcccaccagtctaaggctcatgggctgggagatggcatccccagcacatctgggtggcttcatttcccaccccttcctgcccacaagcccatctggatctctggatcctgataaacctgctccttcccaaccccctctggcatctgtgagctatttccctcatggaatttggaaatgtttcttcccctatttgtaacaatctgccacatctcataaacaattccttgccagagcaagagggagggagggatggagggaaggaaaggaaaaaagtagtacattaaaaaaattaatttaccatctttaaatgcggagtttggacccgctgtaatgagcgagatccttcaaaatgttcactctttggcagttactaatgaggtcgttaggcagagaagtagagaagggtctcataaatgcttttttctgtttccctgccccaggtagcttttctgatctcccctcttgggttcttgctggatacacacagtgtggcctttactgtcacataaacacccttgaaggggtggctcttgcaaacattaaagattgttcattcattcttttcatcatactctgccagatgcttatgatgttcctggcactgtgctggcagctgccatgcaaatcgtgcaggttatattttgcatgagggcaccaaactgtatgcccaaaggaaggggcacccttttctaatttgcataaagccactgcatggatgaatagctggaaagaccaagagcacaatccggacgtggttctccttctatagagcttagaggctggcagaggataggggcagagggaaggcagagaggagaccaccctcccaagcacatcacactgaggagccctcagcgccagtctctaccatgggggaaatagagggacagggtgtgggactgggacagccccaggcaggaaggagcctgcattgtggctcatcttcagctccccccatctgagcagagcccccgtgggtctgactcccctgccgcatcctgctcctgggggctatagaacctactgtcccactgtctctagggacctctgccccaggcttttccctgggcacccctcaggcccaggtgctctttttcttttcttttgagacagagtttcacaattgttgcccaggctggagtgcaatggcatgatctcagttcactgcaacctccgcctcccgggttcaagtgattctcctgcctcagcctcctgagtagctgggattacaggtgcccaccaccatgcccactaatttttttgtatttttagtagagacgggttttcaccatgttggccaggctggtctcaagctcctgacctcagatgatccacccacctcggcctcccaaagtgttgggattgcaggcatgagccaccgtgcccagcccaggtgccctttttctagtggaggtttagtgagatactcagggaaacgtgctcaggagggaagttgaggcactctccctagactaaaggtcccaaagcctggcatggccacttagcttagctggcctgagttgacaggcggataagcccagatagtttcttcctgccacatcgtgttatccagttttccctcaagcatcctagggctccatcctccctctgggcagtccctgcctctaccacctctctgggcttccaaagccagcccactcccacattagtcaccaccagccttggtcgccaaaaccagtgcctactgctggcccatgcttcaggcttttgcccacagcttcagcagagacagcaaagacaacagaagggaaccaagcctttctctcagcccaacttccctgagtttcttgccaaagtatctgtacaggggacctctcttcccactgggcaggagacatcccagggtcacagtgtcagaagacaggaggaaggtccttggtctcctggttcctcggttctgcgggcagcacccctctcccagtttgctgggaagaccctatttgcgtagctggtccctgctgaaaggaacttagccatgggctgggggtggaagacctccatgcctggtgcagcttccctgacagtgagggcgcatccctctgtgtgagcaggcacagtggcccaggaggacaaagtggtagtgtgaggccttcttgccctttctttcacccactgggggctgccagccccctcccctttccccacagcccttctgcagggctgggccccttgtgtgtccccccccaccaccagcatctcagtgttgaggcttccttggcatctcctccccaaccctccacagtgctctgcatgagcccccatcttaccccagccctaggccaactgcagcttgcatcccccagccagggtgggcaactgtctaccctgccaagagccctgggctagggaaggtgacccccagagggtccaggcactcagggtttctgtctcggatgccctgccccagggcacagcctgcagtagccagaaaaggcagtacagctacatcattgtccccatgggcatgaggggaagggccagtgtggtgggcactgctgacctctgtccccttggctccctacagcacagagccccaccgccgcggaccccctgcagcaggcctacgccggagtgcagcagtatgcaggtcgttagtatccacgcgtccccacggctccttccccaactccgtttatctctccacgcctgtgacaccagtgccccctcaggcctggggccagcactgcatggggtggggagagagagtggaaagagggagggctgtgctggcagagaccctccaggctgccttcttgtcagcgggccaccgagagtgcccctgcagtggggttgggcagaacttcaggcaagtgggcaggccaggtggaagtttcacccttgctgggcagttacctgtctttgaggccagatttcccttccccatggagcttccagggccactttgcccaggagcaccaggtctgacaccagcaccacaggcgaggctggacctggatgctgcccaccatgggccacagtcactggcccaggaagcacagatgcctggtttgagagaaggagggcctctagaagagatgccgtttccccattcccttcctcacacactggcagcaggatggggccccagcaggtgtgacagggagcagaggaggagaggtgggaagggacagccctgagtgagcagagggcctggggtcactgagcctaagccgagctgtcagccaggcttctctctttctgtcacccctggactacacagcaccccatcatcatccctgcctagcctgtgtcctactgcctgacctgatcagggtctctcttccctgtgcttagaagagccagtgctgtctcccatgagtgcagtggggctacctggcaaggggtgaggggactgaggtgaagctggcctggcacatctggagcccagaggaggtgctgtcacctcttgggtcccctgagctctgacttcaggctctgttgctatgggagccaggccaggcagaggagggagccggccactcctgtcctacctcaggccctttccagttggacaatcaggtttatccaactcagtcctctgcccctggggactaccccctggcagccttcccagaggccaagtccacacctcaggtggcccccacctcccacacaggtgccgtttgagtgggagtgagggcctgccagctggagtcagctgtggctcagagaagtgggaaatccttcctgtggattccaggtggtgtggggtgatcttgtccaggccattttggtgtttttaattatccatgattctgtgttatgcacacatgtggttcatccactatttgaaattcaacttgcctcccccaaaacatacacacacacacgtgcatgtgtgcatgtaatgtatgcacacatgcactaacaccatgtacacaagtgcacgtgcgcgcacacacgtacacacacgtacacacccacacacgtgcatgtacacatgtaatgtacacgcacgcacacacatacacccacacacatgcatgtatgcatgtaatgtacacacacacccacacacttgcatgtatgcatgtactgtacacacacgtacacccacacttgcatgtacacatgtaatgtacacacacacgtacacacacatccccacacgtacatgcatgtatgcatgtaatgtacacacacgcacacacacacgtacacacacccacacacccatttccactcttcaccttgcaactcctctgttagtctgggaactgaaagctggctttgtcctaagtggctgagtggcagggcgctttttggctgatctgcttttactgcctgcactgaaatctctctctttcttcctgcttccactctctgccttgtcgccggctcttgcttcttgtcttgggcctccagcagctgcctaccctgctgcctatggtcagataagccaggcctttcctcagccgcctccaatgatcccccagcagcagagagaaggtgagtctgcaggccagctcctgggcccctccctccccctgttgtccccaaagaggctgctcacctgggccttgggctggggtgtgcgttggaaaggtgaccacgtttgtgtgctgtgttgaggtgggcaagggaagacagcagtgctgtgaggagtggcgctctccaacttaagggtagaggtccgcttcttgtggacagctctgtacaccagagtggtgtctggcccaggggcaggggcctggacagaatgccctgagggctggcaggtcccacacgaggcacctttcctactcccctcaatcattgctgctggcctgacacagagctcacatatcaaaaccttggtctatgagaaccccttctgaatggttgggtttgtgtttcttccttggcaagcccttgaaccatcccttaagcagaacctagcagaggttaggcctgtgtgtaccagtgcaggccttgtccttgacccagggagtttctggtcttccagaggagacagaggcccatccttggggtcttcactggagggcctaccactgtgttcccagggagaatagctgggagatgagactccaacaacatggtggtttgcagaaccagctctgatagctgtgtgcattgaggaaaagatggtaaccaggctgagagggtcaggaagggaagccccagaggaggtggggtccaagaatccccctcctctggtgggcaggatttggccagtggggagggtggggagaagtaggagtgctcatggctgaggggaatgagagagggagatgagtttatcacccacaggagctgtgccctctgggtgaccaggagaggcaggtggagctcccagggcaggactgcgtgggcagggtgagaagagatgagaatgccccagtacaggcctagtggaagaagggggtgatcctggaaagctgtgtcccaaggccctggtgtgaacagggcaggacagcaagatctttgggtcagatgccagggatctcggaatgccagtcagtgtcttcccatcccagtgcctaggtacccacataagcaggaagacaggaggctggatgaacaggcgcaccgtctgggactctgtgggcctgccacagagagctcagcttgagggggcaggacactaacaaggtcccatcctctctacccctatggaaatggtcactgggtagtgaggcaccaaatctgcccctgcagcccatgtggtcagagccttccgatggcctccaaaatcctgactcatagcccctgcagcatagtgtcctggagccctccgatgtaggttagtcctggaaagagcctcaagagtctgctggtccaacatcatttgacaggccccagtgccagacaagtccctcagaccccaaagaggtgccacagcctgcctggctgagagcctggccttcagagaaaacccttttgggtgggactctggcacctccttccctgtgaatctgaacaaatcactctatcccctcagcctcagtgtcctcacagcaaagtgaggagagtggggagcgttctctggaggggtgtgaggaccaagccggctgagtctgcccccaaactccattctcagtgcacactgcccttcctttaccaagctaccaccccttccaaggctgtgcatgaggcataccaccccagctcacacccagcaggcaacttctgagatcaggggcatcagggcttcccatgcccaggaaagccaagttacaggaacccagaggggtgcacaggaaggcccagcccataccctgcctcacgctgctgcagctgagggacactgggctaccactggtgaagtgggggtgggggtggtcccctcatcaggctgcagccctgggcctgccttgcccttgccttccccacagtccaagccttcatcagtaagaccagggccacaaggggtggggtccaggagtccccatgttgcccgctccaggtccagaacagagagctgtgcctacaggccctgatatcttttctcccactggtgccattgtcagctccctgaatcactctggcctattggctcaggggtctctaaatcctgccccacccttcacacagccgtaggtcaatggcaccctgcccaacacacatgacagcccctactgcaggccttaaactgaggcccccatgggccctcctgcccctctcccaccctacactccaccatcccatatgtgtagctctgaactcctcctcattccttctctccatctctgagcagctgcaattcctgccccccgctcccccaccccacacacacaccttgctccctagtctaggccctctgtggccagtcctggctccagcctctccttggggtggcaggatctgctgctattgtccccattctcccaggccatggtccatgggttgagccaccccagggatgcaggggatggggaagagtaatgcacgataccaacagagccgcacagcatgggcgggtgagagcgcggcactgggagtggtttgtcaggaaggcttctgtgggtctggaaggatgagcagaggttggcagcacatagagctggggaggcaggaggtccaggcagggggaacagcgggattaaaagtgcagctgctgcagagtccaaggtgagcatggggccagggagagacaggcgcaaggtgggctggagcctggccaaagccgtgtcccacagagttgtccgagtcatgaacaagaaagaaggctgtgttcctccaaccctgccaagagttggcttctttatgtcatggtcccctccccatgtggaatgtcatggaaataccaggatattctggtggcaggggaggacccttctgccacctcctcatctttgagctgagcctgaaaacagacagatgcctgaattccccagaggccatctgccccacagatgggatgaggttgccctcagggatggctgccgcagcggctctgccagggctgcaaggtggtcaggggtagccgctttctgtctctgcagctccgcttcaccatttctcagaaggctgggctggaccacattggtctctaaagtcctgccagctctgccatctgcatgttctgtaatctgtgaatgagggagtgcagaagggcttggcggtagctggagttagacagcgtgtgggctcactgtccaggggaagggactagagctgctgccctggcttcttcgtcaggcctgggctagagagtcatccctggggctccgccacacaccgcgcatgtgggattgagcctgcgggccctgtctgtgaaggctccttatctctaaggagaacagatgtagcttccacataaagcagcttgcagaacttgaactcagagccagggccccaagtcaaggcaggtgtcagcatgggctggagcagtcagggcctggaagagtgaggatgggaggaggaagggaggtgtggggggggctggagggggctgggcaggaggacacaagaaggagcatgcccctgggagcagccagtctggttggagagaaaaacctctagacataaaagagaaagagccccaccccagaggatgaagtgtggattcgggcatgagcagggagaggctggaggttctttcagagagggagggtatggggagctgggggccaccaagggcacattcacagggcatgaaccagtgggaagacagcatggttggaggggacagggtgaggggagggccaccagagctcgggggtatccagcaccaggaacccctggaagggggtgagggagcatgtttgtgcccggttctgaatgcgccgtcccccagcaggatgcctgggagccagcagtccagggaggggaggccgaagggctggggtgggcagagggcacagggcgagcaccaaggagggaggaagccagtggctccttgggcagctttaggggttggggaaatttttgttctaggctgtggaccttgagggaatagagatagatggagaaaaggaggagagtggaaggtagaggagcagaagagaaggtgcagagtctctaaatcgaacctttactccagaactgggttgtctggcagcctcatggctcccagagaacaaggacggttggctctggcgtgaaagccatgcagcggcccatgttggtgccttacagccttcactgttgagctcatgcctaggtttccagcagcctctggtcagaaccttgcttcttacacaacactaggtgcagttggttccttcccattcccaccacagcttggacaccatcattgaaatgaccacaagtcactttaaaagatgaaattatatgtggcatatgctatctaagacgcatcttggaacgatttccattttaaagagttaaaattgagcattttgactatttcaaaagaaacaggtaaatggttagttattgggaattttagaaagctaaagccctgcatagtgttcaggggatctgggatattgagatttttggtagcaagagggaaagaattcactctatggagacaggctaggctcatgtcctggctccaggcccctcccagctgtgcgtgttttggcaggtgacttaacctctctgggcctcacttcctcatctgtgaagtggcaatgatgataataatgtcacagggttgctgtaaggattaagtgagttagagacatgtaaagtgctcagaacagcctgacacatagtttgtgctgctgaagtcgcagggctgttactgtggtaacgaaatgaagaaccttcatgtcatgaggctggagggttccctggctaatcatagagcctcagttgcagcgcttcctacgcacctacacaggaggaggcaggataaatcttggtttcctgggtgtgtggaactgggcaggacagttgggccatcaggggcagatgagaaagagaggctgcaggccagggggaggatgggcaccccaatcccagagtctgagactggcctgcgagaagggaaagtggggggtctccccagcacaggacttggctgccccaggggatgccctggtccccccagagcaggggcagggcaggagggaggcctcccggatctcctgggccttccctatcttcagcacctggtttccagagacacagcagtaggtcgactccgcctctggagccctagggtttctaagcctctgctacagatccattttatagaaaaggcaactgaggcacagagaggttcagtgacttgcccaagggcagagcagagaccggagctcagacccggggctcagcatccctgcctcttctggggcgcccttggatctggaatgagactccccctcctaaccttgcccccacccctccctgctgcgctgcctaactcgctcacctctcctctgtctctctcttcccccaccctgccatccctcctcccccgcccaccccctcccctcaccgcagggcccgagggctgtaacctgttcatctaccatctgccccaggagtttggggacgctgagctgatgcagatgttcctccctttcggtaatgtcatctcctcgaaagtgtttgtggatcgggcgactaaccaaagtaaatgctttggtgggtaaagataacaaaccaattagcttcacctaggacagggcggtgctcgcaccaacctaccggtgtccgactgcttttaacctgctccttcacattgcccccgccccagctgctccatggccctcaccagcctcatctcacccttctctctcccactactccttttgcttcttggctttccctacccacacaacctggctccccatctcccactcccggtccaagaaatgggtttcctcttccagacaaattccaacctactgagaagggaaaggggccaccttgacaggggtaggaggggcagcaggcagagcccagccacacccattcccccagtagcccctctcctctcatggtgagagtggcctggcctgagcccgaggctaaatcagagcgtgacacctgggcagggcagtcacctagccaggcccctctcctgcccaccccttcgcctcctctctccagctctctgtcctgccccaactccttctctgtctaccctgctttttgctcccctcctgccctccccactcacctgcctcaggccaccagagctgggcattgttgaggagtcaggaagaggagactggtccctgccctcaggaagcctaagcgctgagcttagatgaaaattatgtttatagcagtgaaatctgcgaggcacctaataatgaaacgacaaggaaggcagatggatataaatacacaaaaaggaagggagggaactccacgtggggagaattggatgaggaaggcatggggctggggtgagacgagccagaggacagtgagagggagaccaggcgcgggggtgtggtgtctgtgctggggggtttccactatgcagaggggggtgtttcacggggtgtggtaggcagtggaaatggtgggaggtccttgagctgagagtaataaaaatacagtttgcaggaaatgtgctcagggcatggtgttagatgggagagggaaaactcgaaagcatccagaagtatggctgtcagataaaatatagatggccagttaaatttgaatttcagatagacaaaggatacatttttagtataagtatgtacttacagtaaaaagtatttattgttgatgtgaagcttaaatgtaactggcatcccgtgtttttatttgctaagtctggcaaccctatccagcaagcgtcagacctcctcctggaatttcatatcaccctttctcctccactcctccttgttgccctccgacctcctcatccttctccttcatccgttccttctgggccagaccctttcgtaagtcatgaggactgaagagtccagtccccagagagccacatatggaaccagagctgagtctgccagacactcagtatctccaggctgacccccagattctggggctgggaggagagagtaggaggttgagttgcaaggaacccaggtcacagcttgggggtggtggaggggagaggagacaggagtgcagcatcaggaagcgcatgttaaggagtttccagtctggagtccaaccttctggaatcatgaagggcttgaggattcggagcatgttccccaaagtagtcaagatctttgcaccattgtcccttcccctctggagctgccacaggaaacttgtggtctttcaatggcatggagttgccccagcagctcatttctctctgggtgtggaaaaacaaagcagaagcaaaagacagggttgcagtcctccactctttggtatttctccttatgaattacagttatgtatgtaaaaacaacaagctggaaatcagttgcatctgctctttaaggaagtcccaaatgttacataaatgagaagagcgctgctgagagcccaggaagctctgggcgcctctgctggaacaggtttagtctccagccatagctgggcttggcatatttgcaccatcccgggtgtgggtgcagtccggctttccaaaggcatttccttgcagtctgctctaagcactaccctctttaagctgttagcccacttaaattagccaggactacagtttttttttctctctaattagtatacctctaatctagctctcctctcttgaacaaatttctgatgtcgagcataccagccctgaaaaaaggacagactcctgagatgctggtccagcccagctgttcctggttaagccacttgggttctctctctcaccaggcagctgagctttctgccaatatcccagaggcctttaaagtgaaacctaggctgggtgcagtggctcatgcctataatcccagcactttgggaggctgaggcgggcagatcacttgaggtcaggagttcgagaccagcctggccaacatggtgaacctccatctctactaaaaatacaaaaattagctggatgtggtggtgtgcgcctgtaatcccacctactcaggaggtagaggcaggagaactgcttgaacccaggaagggaggttgctgttagccgagatcacaccactgcactctagcctggtgacatagcaatactccgtctcaaaaataaataacaaaataaataaataaaaataaaataaagtgatacctaacttcagcattccctcatggacaagtcatttaaccctgtgagcctcaatctcttcctttgtgaaaaggggattttaatcatcgccccagggatgctgtgagggagcttacccagggcagaccctcaggaagtgctaggtcccctttgttcttaaagtgctatttttgctataaaagtggccctatgttaaagtgaactcctcaaaggccacattcactctttataagcacatgtgtaaatttatgagcagaatcttccagataccttcatgagggcatgtctagcacaaatgttcctatgttggaaggagggctgggggaataccatagggggattctatctgcgggccttcccacagggcctgggagcagaaaccttctgaggataggaggagggaaggagaggtagctctggaagaaggaagacggtcctggaaccatgaacttgggagacagtgcccagagccctgccacaggggcctccagtctgcaggggagggaccctgctcagactgctagccagttactaacagttcaagggaagaaaaattcccttgaccctggactgcttctcaactctcgggcttccgaggacctctaaactcttccaggaaggctgggcttctgccctcctccagaacttcctctctgccctccccacacagtggttctgcctgccgctacgcctgtgccctagacagctcctccagccctttttatcttctttcccctcccttctttgagctcaggtggatgatgagaagaatgaggggcagcatgtcccccatagtcaggctaccttgtcctggcagggacaggcttttgtccagccaccttccttattctggggaaagcagtatcaacacacaattcacatatttgaaaactgctctggtttactaagtacttgacttttacttgacgtaacttgactttagtgattagacatacaggtcagcggaggtggggacgggccaggaggggctgaggggagctggtggaaatatggctggaggcgaatctcgtatggatcagctgaaattctccctatttattctggtatctatatttatacagaggttagttttgttgctctgggcccagctctgaccaattgttgcgcttgttcggctgtaggagcaaacttgagcaaggcaggaaggagaggagagaaagaaagagacgatggaggcagcatctggggcagagggaaagagggaaaaagaaccagcaggtagggaaagtgaggaagggctctctttcttggagagaagtcccaaggcaggcccgaggtaccacagacaataaactgagaagacggcttctacttcactcccgggtggctgtgcatctctgtcttatacctaatggccatttggggaccattacgcaacgggcacgttcatgggaacgcctcagtatctcgccaagctttcatatattttgcaggatctaagtcctttttacaggagaaaaggcctctaaagtcgaatgaattcaaggaaatactagattaaacaaagctataaaggttcatttactacaactcggtgagggaggggacgttatttgttgatatgctgcactggcccagtgggcctggctctaaacctcctgaccacacaagccctttctcgaggagcacctattagggccagtttgggaaatgctgatgtaaaatgttgtctgtatgaagagatgcattcagagttccccaaaggtgacttctgacctcattttgggaacatgacctgtgcccatctgggacctgcgcggttgggcctgggagccgcaaggttctgcatgccatctgggcacaggagtgaacgcgtgggaagcgcttctgcacggagggctgtggcctgatttgcactgatggtcttgtgacttgttatggacatatcagctggtgcgtgcttagtccacggcgcagggcgtggagaagagaggtgccgacggcgcccggggcgaggtgacgcccagggcccacccggagcctggcggggcgggcagaggccgggagtgggggcgnnnnnnnnnnnnnnnnnnnnnnnnnnnnnnnnnnnnnnnnnnnnnnnnnnnnnnnnnnnnnnnnnnnnnnnnnnnnnnnnnnnnnnnnnnnnnnnnnnnnnnnnnnnnnnnnnnnnnnnnnnnnnnnnnnnnnnttttgtgttttactgtgcctttggtgtagcttagtgatccgcttctgtattgcagatttaattgggattttattggggagtcgttggtctaactgcattatctttccggccggcagtcacgggtggtcgtgggaggtgtgtctccgagatatgagtggttggtgtttgtcgattttgtggttgggatgagaagagaatatggcgagaatagggtgggatgggtcgatgggagggtatgggggttgctggtgtgtaactgagtgggtttcggctgtgacgggggggggcggggagctagagggggctggcggggaatggagctggataggggggggggggggtgggtgggggggtggcgctgggatagctgagagggctgtatagggggtgaggaggggagccccgtcttgggggggcttgacagaaggggggctcccccccgtcagggtgggtatttttgagaattctaaggtggggaagttcgccagtttccggccggctttcccctgccccctccccgccggcagcgccccgggcggccccgtggaaacccaggccctcgtccctcgtgtctcgccaggcttcgtgagcttcgacaacccggccagcgcgcagaccgccatccaggccatgaacggcttccagatcggcatgaagaggctcaaggtgcagctgaagcggcccaaagacgccaatcgcccgtactgagcgccggcgggagcgtcccccgggggagaccaggactcgcacaggtaaccgggggcggccggggcgcggggacgggggttgggagggaaccagacggacccgccgcctcctccggcctccgtgggccggaccctcactggtgccttggacccgctgcgcccggctcaacctgctcctcgccctgctcctcgggccaggcgcagagctgccgtcaccccggcagaaatgggcctggccatttccctgtggcagggccaccaggggcaggagtgagggagccactccgggcgggtgaggcgagccctgggcctgcgcctccgggtctacattggcagtcctgttggccagagaaccctggggtgaacaggtggcaagctcaggctgagggaggttgggggcagaacaggctctacccagaagagctgcagccgcccgcggggcctgctcccagacccccggctctctcctccccagttcttccaggagggctggtagcctttagacacttgacccctgcacccctgtctttccccatagctcagtgaagagaggaaggacaggatctttcaaagggaactttactaagaaacaaagcaggatgggatgaaagctgaggagggtgatggtacagcactgagatcccgggccctgcctgccccacacgggtcatgatgagtggtcgttgttaccttttctgctgggctgggtcctgcctaggagctgaagacacagtcagccacgcctcttccagcccacgtgttcccctgagcaaagttcttcctgcagaaagaatggggggagattccccaggacatcaaaagtcaaccttcagaatggtttcccccagtgctgtggctcttgcagcctcggcttcttcacagagcagaggtgaaggctcctttcgggcctttccagctcagcaccctgctgccctctgaccgcccctccctgcccatgttcctccatttattcagcagtattgtgtgccagctactgtgttaggtacttggggttcagcagtgagcaagattgagaaggtggagacagacaataaacaatgacgtgtgatcaaagaatatgatctagtatgtcgagattgttggctacagttaaaccacatggtcagtgtagatctcactgaggaagtgaattggagcatagaaggtgagggaagcagccatgcccccgcctctgagggaacagtcagtatggaggctgcaaggtggggctgcagagtggagtaggaacagcaagagactgggttgctgggagagtgaggagggccacctggtgtggggccttgaaggccactgcgtggactttggtctcttctctgaaatgggagatggagagagcattggagagttctgaataggagagtgatgggtaacttgcatttcagtggggtcaccctggcttctgtgttgacaatagcttgtagggggccaaagcataggtctactgcactgaccactcagtccagtgtcacagcagttgatgagatgtgaaggaattaatttctaggtgtattttgaaagaggagccaaggatgagtcccaggcttttggcccaagtcactggaagaacagagggattgggagaaagatcaggcatgtgaaaaatacacatttgagtttcacagtccagagtttgggagggaggtctccagcttcccagtctcccctcaaatcttccacccagtgctggggtacagataccagcagaacacccttcctccacccagaagtagcaactctcaccctcagagagcaggggccttctctctgggggagtgcttgtgcctccactctctgcaatcctggaaaagcaaaaccagtctttcctgcctcctggtttcccatccttgcccatttctggcttgtttcccatccttgcccatttctggcttgtgtccagatgcaaacacacatgttattcagagtttgggcaccttcttgtgccaggcactgggcccagtgtgggggatgcaaggatgaatgagtcaccatccctgccctcgaggagcttctggctctgtgcacacacagacaccaggaggcagcttgcagatgggggcatttccataggaatggagggacggtttcgtgaaagcagctttttctgtatataggacactttttcttaaatcagcatagctctgccattaaggtgtgacctgggttagggtgcttgtcctctttgggcttcttttttctcattaatgagactaaggtgttagagtcaactagaggatttgggggttagggggatatgaatcaggcagggtcatgtcccgagattccaaggggcacccctgaaagtagcttgtcttagcctccttggctcaagccaggataaaacctctaggttagaagaattcccagatgaaggagtgagaaggcaggtttattgtttgggatataaggtcagaagtgcccacagggttgaaccagctggcattcagagttggggtgggggcttgggaggagtggtttaaaacacagagtcggttcttccaccagggcatgcaaagggcagaaagattagaaccctagaccttcacacagtgcttaccatgcaccaggcactgctccgagaagtaacaactaggagatgttaactacatagctacaactacctataaggtaggtagtgttagtatttccatttcacagatggggcacagagagattaagtagcttgcccatcagctagtgagtcacagagccaagctttgaagccagggagccttctccccttcaagtgaggagaatgagaagccccaccctaccctcaccccaacctattaccccagagtaccctgaatgtcctgagggagtacatatgacacctcacttttctggggtcagccatctaaccacctcctttctactaagcagtcctttaaaaaactactatgtcacataactcctacagtaaggttgacatttaattttcatttagacagtattttaacgaatggtgctgtcaggcttcccagcccaagactgttggaagctctaatagaaggcggttgctaagaagagatagagagcttctcaaggcagccttggggactgccttgaggcagtggctcaatgagaagtggctgccctcggactgccagcgagggaggaaaaggcacaaaaaatcagctaaaatactgcctggtatcacaggccagtaaagggtattcatttgtgctgaggcctgagctgcagccccaggtgctcagaagggcaggaagcctgagcaggggccgagggaccagccatagctgggagcaaagtgggaggtggaagggggacctcagggctagggcagctgccccatggtggtgcaggctttctaaggccaagtcagaagggagtggggacagacctaggggagggagaagggcctaggcagggcagctgtggggagtacagttgggctttggttccatgaagcaaggtcctgagtggggtgggattagggttggagtcagtgactctccttcctggcgggttttctgcttccccactgccctacccctctggtggcttgggtttgttgtcttgtgctaagactggagtttctctaagcaatctttgccaggaaataaataaggaaggaagcaaaggcaggaagagtaggcaaaaacatgcatgtggccaggtccatagccagcgggcagaacacacccagcctggccccgcccagctcagagattggcctctgagccccttgttccgccactgcttaccagacacactgggccccagcagcaggccaggttctcagacttctagcactccagttctatggctggagagtgcaccaagcatcttgtcctgaccccagtgagtcctgtgactctggctctgagtatgcttttggagagtgtcgggtccaggctttgcaggcacaggtgctttgggtctgacctatacagggccaggctgtagctttcggcctggccctcctttgcttgagaccagctgattttaggacctgagatctgaattggttcagcttggccataatttcctcacccagctcggtgagttggacttcaccatgccggtcagtgatcccactgccacacctagggctgtgctctgtgagcctccaccccgagagtggtcgggaaggggtcaccctgcaggcagaagaggagctgctgcctaatgaagacagtagccagctgagcccgtggagtcttgggggctcctcagggactgagtgtgagggtgtgttatgtgtctagggccacacatgtgtgagagatgagggtatgtgtgaggaagttccctagattgagctttagggacaggggctgtgtgctattcaggtttgtgctgcagtacacaggacagtgcctggccctgacaagcggttgcactctaaagctgggagaggagcaggcagagtgggaaggagtaaacgcccatgaagggctcagggctggaatggagggagaaagaggagagtcccagggagtccctgagttgcagttgccacagcccccatctgatggcaataccctccttagttccttaggcctcttctcccgtgccaacgggagctgcccgttggccatcctgggtgggtctaagggcttctgggaggagttggaagtggcatttcaggacttggtgggcatgggacggtccctgatctgggggaaggagatccagtgttggaagagcaaagaacccagccctggtgggcaggcaggctggggtctgcagaggaggagtctagggtgcttctgtgaaggttgagctggaggccgggcttgggctcagcttctttgcccctcatccacagtgatattttaagatcccaggcctcccttcctccctccctccctccctgcaggaaagcataaagctgagagtgaaagtctgctgtatgtagaagcctgtggactggaaagcctgcagatcaacctggcacacaggccttggcccaggcctgagtgccacaggggagcagggaatccagtgcaagctcaagataactatggggaggggtggagctaaggaccccaaaggggcccaggtgcagcagaggactatgaagtggtgaggggtggagaagtcagccgaaagttgaatcacctgatgattcctgatagcgaagagaactcattctcaactacttagggctccaccaggaaagaaagctgaaggttggggccttgcggtgggccaggctggaaagctgttcctggaggggtatggggtgagagggtgggaaaagaggatggggtagggaggaggggaagtcagcagagcaagagtgggagcagcaaaggctggaggcgctcgcctctgtgccccctgcaggggaccctccagccttgcacatggccccctgcagggcaccctccagccttccatgtggcgcttttatgggtcagggctgcagaaccttcgaagggcttcatgtgcctagatgcagcctcagtttggttacacaggccacttgggagcaaggcaaagagtgtgagcaaagaaagagggtaaggcaaatgcaagatgaactcagtagtgccaaggcatgtttctagaattccaagaacattgatgaattttaccctaaatctcaaaatgaaccctgctcaggttctgaggaaagtaatttgaggtggagcagaaacgggggagggccataacctccacagtgggtgcccttgcagccttctctaggatggtggccagggtgggtccacagggtgggagggccgagctgctgccagcctgggtggtactatggcagcaaagcattttgtagatggaccccgtggacacagcagttaccatagcaagcctctgacctacccagctgaccagggccaccttgacagacatcccctgctggcccacaggctgtagtcacagaaagctgaggagggagggagcgccacccctgggggagagaaagaatcaagggtgatgaaaagcagagcgcctgctccctgagattgcttgctggccaaggtggtttgaggggctgttttattttttttctggcccccttgccaaaccgcccatgcccccctccccaacgcatgatggatgcccttagtggccctgtgtgaggttctgcttctgttcacagtgtatcatgtgtctgcataaacaaccgtgtgtgtgtatgtgtgtatgtgtgtgcgtgcgtgtgtgtgtgcgtgtgtgtgtgttgatgtgcccatgtttgtctgctggcttcctccatcctttgagttcttttcagttctcttatgatttgactgctgttctctcatcagagcttctagattgatgctgtggtctggtgctgtataaatatattttctttttaattttgttttaacttcttccttgccctccttcacccaaatcccagccctccctgccctcccacactccccaaccccacctgccctgccccacctcttccttcccccacccacactctcttgtcctctctctctctctctctacatatataaatatatatataaatcttttcttcttttgtcattcaatcaaattccaacaacccaaccagggccagtcaaatccaccacagtctcgcgctgagctaggaataaagttcacgtaatcacatgagagtggagaaaagtcccccatccgtaagttcaaatcaactcaaagttcacagtgtgacatgatggcgtcatgtaacaaggctaagaatcggttgcatgacaattgccgtcaagtttcgtggaggtgctgtgattggagcgtttttcttggatgttgtatcagttgatgattggccagtcatgatcacacgtgcattttcttgacttttgtgctgccacaatcttttttgctgtgctcattttcgtttcgttcttggtgcttgcagtggttttactttctgttgtttggtttttcttgttcagcgtttttttatgcttctctagatgtcacatagagaaaaaaacaaaacaaaagaacaaaaaatagtcaaaataaagatgaattcctgaattatcaaacatgggatcatttacctgtgcaaaccattatttttttcttaaaaataaggaaaacatcttaaaaatatctatgcgtggttgatttacttgcacttgaaaatattgtgattttatttttttctagaaatttgggggcctttttcaattgacactttcctaggtctggtctttttccagttaggctattttcaatctcacttcaaagggaaaaaaaacaaaaacaaaaaaacaaaaacaaaatatctacagtaacagaatgataaaaaaattctaaaccaaaaaactagagtacaaagccagaggcctctgcaagagagcccggtaacaattgtaaggtttgtattgtaaccacttctgctaaattaaatgtggggaggggaggctggggactgggggctcgggagggttttttttggttggtttggaagaaacagtactaacaaaagcaaaatgcacctttttgtttacaactgaaaaagggtccttgacaagtgttttttaattttattattattttatttggtgttgtaattgtttagactgctgtgtacggtttgctgtttgttgaatcaacagtgtgaaaaacctgccagcatggattgatatacgcatgacgttgtcccctcaagtgggggctttgcagttctaactttcttgatgtaaccagtcacccccatgtataagtggaagctgcttgctagaatggagatgagtctcatttgttaattcacaatgattaagcattcgccttctgattctagtcagatcatgatttttttaaagcaaaacaaaacaccaaaaagccaccattcaaaacaaaatcaagcactgtctgagttaatttatttaagtttgataattaaatctcttctgaccttttttaggttttcccatccactcccttgaagttctgaattcctctaaattccctggcatgtatgagaaaagtattatgtgtgtgtatgtgtgtatatatgcatatacatacacacatatccatgtatatccacatatgtgcaggtgaatatattctacacatatatccagatatacatatatatacacagcctcgcaaatagttactgaccccgggaaagaagtggttggctggaagctgggcaaggattctacaaaatttgagtcacggatgtgtcttccttctttcccttgagctgggaggagtgggctgggctgctagatttttcctatcttgtttgctaggcttctgtatacatattgtatctgggctagatccctcagagacaagtttaattatgaattcatatcccgcagtcccaaattctccccttagatgtagctacccccaatccagaatgctaaagtaacccaaatcaagaaccttctcccaacaacgaaacctcagctacaaccatcaccactagacctcccagtggtttctactctgaatagaagagtatatttctttttaatgtatcatgatcatgactaattctcatactggtctctcttccttccctcccaccatcccctagagctcccatcctagcccctgaggcaggttcctattggtgtttggatgctgtttgtgttttccctcttggcttaatcagccctgattttcttcattttagggcaggatgctgaacgggctacattaaaaaacaaacctctctctatatatatttataaatgagaactgttggatgacacctttgacatatcagccaatatcaatcaagctgaagactccagacactgtctgtgtgactgtaacatttcttcaaggaaagtatagcgtctatggagttcagagggcacgtgtttgggggaaaatatatatgacatgaagaagaagatgaagaaaaatgagaaaaaaacacacaaaaggcaactttaaaacaaaatatcacgagcagacggggaggctgaagggctgggagctgggaggagacgctgcttaccgatcccggggcttttccagcccacgggcgcctgacgcaggctggggcaagtggtgcgtggggcctggtccccaaggggcggctgagaggccgccactgagcatctctatctgtcattcctttagctatttagggaccaaaggaccaaactttttattgcagatgtgtagctctatgtcaaatagagggggaatggaggaccccctccttcctgcctcatggctgttcttgaaacagcttagagcgattctatgaaaaaatgtaataaaaaattaaaaaaaaaacaaaaaacaaaaaaaacaacaaaaaaaggaaaaataacgcttcaatgcttttaaaacagcaagataatagttctttgatactttgagaggcgctttgatgaccctcatccaagtctatgacactttcctatggttttctgtattctatgtctggatggagctgttaaaagatgaacaaattggtggatatttggggaaagcaacacaaatcttaaaactcacccgtgaagtgtgagaaaacaaggaggggaacaaatgggacttaccaagcaaggtcattgttgtgaaaagtctgtaaatgcttctaactcttccccctcttaaaatcataatagttgtacagaattttaaaaaggaaaagtttaaaatacctatataatagaagaaaaattagaggaaagcaaaaaataaaaaaaaaaaataaaaaaggaaaaaaaaaacctatagaagttagcattactgctaaaatcccagatgttgtaggactgtacttttgtagagtttagacagagcatcaatcccttctccccgcgagtgcagtcggatgccgttgtccccaagggccaggccgaactcgccccacacctgcgggcgcctggctgccgacgccggtggaggccacgccgtcggtcgggaacggtcgcgtcgcccgggtcgccgccgccgccgccgccgtcatcctcgcctctcgcttccctctgggagctgcgcgcgcttcactcaccttccgcttcactcgccttccacgcttgctccagagactttccgggcaagggagaactgggaactttcatcttaaaacaactagacaacacacacacacacaaaaccttaaaaaagagagagaaaaataaacaatctttgaagaatttctgaaactgtttacaaggaattttgaaaaacagggatgtttaaatgatgccggctctgtttttctgtaaataaatttgcatattttgtaggacttttaattgtaatgatagagaaaaaaacaaggaaaactatttaatgaaagcacgatatttatctttggtaaatgactttagagcagttaaagacattgcttaaaaaactcagaatcagaaaaaacactgaattatttaagaacacatatattttaaagtataacatatttattataatttatttgcacccttgggaagattgctttggcattctgccttgattccttctcattgatgtccaggtcatctggaggccgggggttctcagacctaccagtttccctttagaagaacaaatttccagttcctctagggcctcctgcctttcctttctttctgtcaattttgttgttgttgttgtttttcattttctttttttctcttgactcctccttttaggatgtccagatgtaaaaaaaaaaaaaaaaaaaagaaaaaaagaaaaaaaaaagaaaacagctgcagttcagtacaactgctcttttcacactcaactccctaaaactccttgtaaccttctgtaactattggatgacgctttctccagcttagccctaaataaagcacagtttaaaaaaatatttcttcattggtctgtgcctctcggactctggccagctgtgcctcacagccccaaggcttgcccactggaagtagctttggtcctctttatggaatctgccacacaggccctcgttctgagcctcagcatgtgaggctcttctgggaggtgatgggaacaataaaaggaggtcctgttccactctaggaagaatctctctggactggtgtgtgtctctgaaagtccccactgcaaattcattcttctgggttcctggcagaggtggccacagtgtccaagcagaacagaaaggaggctacctaggccacccgacctgaaggccgagcaagtgttgggttggggggaagttatgtgacaccttagggaaggaggcagtggagggaagaggccacaataaaggaagaaggatgaggatgcaactccaaatttaccagcaagcatcttgctcttggccccacacctcccgctgctttggcagtttgcagggatggagaaaacaggattctgggccctcagtcagggtcctggtgggggcaaggatgtagaaagaagagtaggggccctcccctggggcgtttcctggcatgctgcctgtcctacacttagatacgagctggagagaggtgtccagaccctgaatgccagggtgggagggaaaagcattccgaaggaggaagaacaccacgcaggacttggagaggggcggcaggcctctggagaggagagcccagacagctgcacaccagctgcatgccttcacccagtcctggcctgggacagaccttctcaatcttcactatcccacctccttcccttcccctgccctcagctctgcagtctggtctaggaacgggcaactctttcccagggcccccacctctctccactgctgagacaggagggctgccaagtgaggggcagggaagctgcaaggttcagatgcctggaggagagaagacaaggccccagaaacaagggtcattgactgcctgtcagtctgtgtccccctgtgggagatggggaaatggcttcggtccccacctgtctcctctgaaggagggtatggagagtagagctcagagccccagctacagagcagtgcctggatcccatgctccatcctctcctcccatctctcttttcagggccaggggccaaatctgtgcttctgatgttggcctgtgatgcattaggctggagagaaagatcttcgtgtatcagcaaataagggaaggccttccagccttgacctaaatgtggacatggttccgagagagggactgaggagaccctgaatgtcccctaaactaacccccttttgctgttcaacagggctgcaagtccaagtgacagcctgctgtgtccattctagggagctgcacttcttggaagaattagcttcaaggggctggatgtcagactgggtattattctgccctgagaagaatggaaggtgttttctaagaaattctctggggagtggggaggtgtctttaggttttgagcctccgactagtcaacacggtgatttctgttgcatacctgcagctgaaagaggacagcctcaacccccagcaccccctcttactctttcagaccccaggaagcctcccagagatccccaagtgacctccccagacctctcctgtttgtgtccacctccccactgtgtacccttgtctctgggacatagccctcccctacctccacttaaagtgttgtagctaagggcttaggcaccctgggagctgtcaccagagagatgggctgtgaagccagccaggcaatttcgccctcttccgggtatggctgactgagaggggagctgacaacactggagccagatatgaacattccagttctataaaagaaaccttcaatgtaaaaaccacgcaccaggtgactgatacatgcatagcacacttaagagagaatacaatttattaacctctggggaaaagagattccttgaaaacttgctggaaactactggatcactttgcacatgattatggagagagagctcagggatccctgcaactcatccatcactccctggttaagaactcctgatttgcaatgttagttaagagaacccaagacaaaattcttgttgatttctgcttctattctatggcttttattcctttgctattatcctatatgcagtgtgtggcttcttcatagcacccctatttgtaaaagaccttttgcttattattagaaactttttatttcaagcacaagaaacaagagtagagacacttgcctaaggaatcccttaggcaagtactcactacctagcttcagcatacctcaactccaacagtagtttgacaaaaatcccaggtatcaagtcatttcattgctaaatgcctccacttccccttaatgttttccatgctgcattgatgtctgccagctggctctggcctgttgggcatctgtaaccttgctgtggcagccgctggggaacttggccttcatagcctcaccacagccttatcctggggtggaactggctcctggtgggagccccaggcttctctccagcacctccccagggcaactgcacctgttcccagcagcactttcaaagtccttccagctcttcctccaaagctttgtagtcacagcttctcttttctctttcttctccttttatcctcctatctctgtgatgctagtatgaaaaagttatgtttatatgagacttttcatttaatgctcccatctccctctgtgtttttctaaagatctgacctttttcctgttctgagcaggattacacctccgtccctcatgctaagcactggtagagagaaacacaagacatactagagcttccccactcatgcaagcactgccaaggcctccatcctccaggactgctgctagtcatctgggcaaagctgcagatccccatagcacagggtctgcagggctagtgtttgaattacagtggataaaacacagataaacattccccaccttgcttgcccacttggtaaagtggataagggacatatggcagtgagcttaggaagcccagcccaaagtgacagcatcagacttggctgtgaatgccatttgactatttacccaaatggaacccacccccaaataaaaattattagctaccattgatgtactaccttcaacagactagtgagttctggaagttggatattcagtcaatattgattcattcctgcattaatgagtgaataaggaaggaaggaatggacaaattacggacaactgaaggcatgtcccaaagaggcagctgttctggaaatactctttaagtagtgacagcacgtggaataagtgtatagtcaacacaccctcccatccccagataaatgcttgcaagtataagatttttattttaactttctagtttcctccccctactgaccctccctccatttctctaagctgccctcccttctctcctcaagttctccccttggttaccccccagtctctggtccccaacactcccaggtgccccgggacttgctagtgacagagtggaagcctggagagccagcatcagctccccagggccctctgtatcaccctttctccctcttcctgccagcctaactgtttgcctcttcaggaaactctgagcatctccatctctgcttctgccctttgtggagctctaaccaggactttcccagactagcagaggagatggaaggattagggtatcagagtgaaaaaggcatggactttgacttcagaccaggattaaaatcacagttctctctaataccttctgtgtcactttggaaacattacttaacctctctgagcctcaatttccttatctctaaaatggggataatatcatccccgagagtgttgagaagtgaacaagagacagccacactcagctacattccaccccaaggattatcagagtggcaaatttcttacagcatagatactcagaatgaatggctcaggctgcgatctcatcctccttcccttttcttaattccattctattgacaatccacctcccaacagaagcaaacttgaacttgacacaagaccattttaggtcatttttttgtgaagtccagtcagcatatgccactcccagagaattcctgtcatgccgaggtgcacacacctctgcctctcactgctctttccagggaccccaattagctgacactcctgcgcccctgctgctctctttgccctttcctttcgcaagagcattcccaatgcaactgtgactgctgctgtctgcaaccttcctcctctgggctcacatggcctcaggctgcatactaatttggtctttgcattttaaaattttttatctatttttttgaataatgtattcatatatttcaaaattcaaaacacaggaaaaaggaaacaatgaagttcttcccacccctgaatccagtcatccatttctctccctagcagcagcctgtgttgccagttcttgtttaccctgctctttaagtgtgtgggcatggagtgtgtaggtggaaggaactcagctgtcatcctcattttcagtgaggagacccagagccaggcagtgatgtgcctaggctcctgtagctgccccatgtgactcccaagaggtgagcccaggccttgggatgctcgggacccactgactgagcagaggcatcagggccatccagttccactcttatcatttgggcatcattcattgaggcacgggtgtagctgtcatttatggggtgctgctctgtactagccactgcattaagaactgcttagttataatctcatcgaattctcacaataattctatgatgcagatgatattaccctactttacagatgcaaaaactgaggctcagagaggttaagtccctcacctaaattacccagaatcagcattcaagtccaggtctagctgcatggctgtgcccttgatctctacatcacatctccctcagttataaactctctgcacagttactcccctccagcccttctctcatgtctcctactcccttctttcttctgattttttttctcaacaaccccaatttcacctttaagaaatgacagcatctatattgatctaggtaccaatccttttcttcccttctctccttgattatcttctctccttgatagagctggagttcttaaaggtgagtgagtaacaagttagtaaacgtgttgctaatgggtgcataagtccccctccttggtagcacttgctggttgtagggacagacaggagcttttattattaacaaggagagaaaattaaattgtaataaatataatatttattaacattttatggagctacctgaagttcaaaagccttttgagctgtgtcagccatttcccccagtacacttaacactggagaaaatgataagcaaattcttaagatcagtgcaaactggaggtgctcaactgggtttgcattgattttaagaatttgcttataaaaaaattaagcttattgctggaggtggtggctcatgcctgtaatcccagcactttgggaggccgaggtgggaggatcacgaggtcaggagatcgagaccatcctggccaacgtggtgaaaccccgtctctactaaaatacaaaaaattagccggtcgtggtggcgcatgccagtaatcccagctactcgggaggctgaggcaggagaatcgattgaacctgggaggcggagcttgcagtgagccgagattgcgccactgcactccagcctggcgacagagtgagactccttctcaaaaaaaataaataaataaaaaataaaaaaaaataagctttttaaaataaaggggaaaattcagccatttgtgaaggccccatacttcactaattgaggcacaaagatgcctcttgtcttcagggtctccaacatgattcattgttgctgttgcctctctgtccttacctattcctggggcccagctcagggagccatgggcattgggatggcaggaagtccagagggcccaggagctgtcaaccttgtttcccttccatttcctgctctcctcatgggaaccaaggaggggcttcaggatcaggacaactgtgggtcattttcaccctgcatgggcaggatgtgggcttctactaaggagatccaacacacatgccccaagcttctcactgtactcccgtcctacacagggtctcagatcccattgttaggcctttttctttgggttagacctgggcctcattagttctgcttttaaaatgaaaactacctgggcatggggagtaatttgttccctaacctgctgaaccagtatttatagtgtacctactgagcacagcactgcactaaggattagaggtgaagagatgaagatagcacacactgggtactttccaggcccaatgtgaggtatgttatgggtattatctctaatcctgtaattctgcaaggtgctatcaccctaccttacagatgaacaaacaggcttggataaggtaggtaacttgccccaaaccacactgtaagaaagtaatggagccaggattcgaaatcagctgcactaattcccccatgaggttccttgacaagcaaaagacaactgcacactagcctgtgggaactgtgttgggggcccaggacagcccagaggagggaaggcaagtggccctgtctgggaaagtggagacacctgggtcaggttttgtagggtgagcgggtgttacacggactccatgggaggggtcatgaaggaacaaaggaccccagaccgtctgaagaactgcaagatattttaggtaggctgggaatatgctgggggaagacacaggccttgtttcaaaacaatctacctacttgtcatctggacactgtcctggctacttcagggacaccattccagttaaccttcgcagcaatcctgggccctattttacagatgagcttatatgctgtatgaaagtcacgtgaaccccagaactgggatttgaacccaggtctgccctatggcagacgccgtgtatgtaatcttcatattacattggaaaaagctacctattcaaggcacatattcaaggcataatggctcctgcctcaaaagcctccttgctgactgtgcttccaagcctcaaacagagacacacagcctatccacagggcagaaaagtgaagtcaggccagtcctggaaaggctcagatctctctggcctcagatccctcctctgcaaagtgagcaggcagcctgggtctcagggatttggcccagcgtcagtgtccctgaagctctctgccaagtgccgggaaagggcactggagaagagaggtcagaggagatgcatgactgtgagtaccctcatccttgctctgggtatgacagtcaccctggaatgagggagcttggcaaagggttttatcctccactgtattttgctcttgattctgggcaggatccagctcctgccttgccctcagtgctgagtgaccttaagaatctctgggctcaaagcatcccctttgagagtattatgtgtcttcagcattgacttcaatatctggcatggagtaggtgctcaccagtgtttgctgaatgcatgagaagaggtggggagtggaagcggggatgccttccacaggcctcttctgaagcaccctgggcctggcccactctttgcagggcccctctgccccatgttgccctaactctgaacagggatcaaaagaaagcctggtggttcaggtcttcccagtactctgggagctcctgggatgacaggcattcggggcagggtctcactggggccctcaaatatggcatatggacacagattctcatgccattccagatttctggccatccaaattctccctgtccttaagtcctagtccagggtccacctactccagggggtctactggaaacagagcacctgttttctgactttctagtgccctgagtgggaaccacttcactgggctcttgttcccatgctgttgtgtgttgctttgtatgtagttcttggcctacctaatggccctgaggatcagaagtaaatggtctctgtttccaatctgtctcctaggagtggactggtcaaagagagtaggcaggggcaaagtagaagactaaggatttaaacgcaatgtgctgaaacatcaatggatgataaaacaagtgggtaaaaaaaaaggtatgagaaacaatatttacatagcctcaaagtatacccccacaaaatacttatacattacaaagggaaagttagtaattttattatacaaggagaaacctggcagataccaccttaaccaggtgatcaaagtaagtatcatctggaatgtaatatgtaacaaatgctatcatgggcctcctggtcagatgtgttcaaaaggagacagtgtcacttattcttgctgagaatgcataaccagaatctaatcataaggaaacaagacaaacccaaaatgttctatgaagtaaatggcttgtgctcatttaaagagacaagacaactaaatgtaacttgtgatccttggccagaatttctttcttttttttgtttttgttttttggttacaaaggatattagttcaacaactggcaacacttaaataagatcaggtactgtgtcagcattgatttcttaattttgatacctgtactgtggttatataagaggctgtccttgtttaggaaatatatactgaactttttggggaaataaggatattaggtcagcaatttactctcaaatgtttccagaaaaaagtaataatacagtgtttatatgtgtgtgagagagtatgata

SEQ ID NO: 803 - DNA, 2570 bp, Homo sapiens
agcagagagcgagcggagagcgaggtgtagagaaaccgagggggagagaacccgagtgtgtgtatgcgtgtgcgtgtgtgagcgcgagcgagcgagcgagagagaggagcgagagagtgtgagcgagaaagaataaaaggaaagaagattttctctatgtatataaagatggccacgttagcaaacggacaggctgacaacgcaagcctcagtaccaacgggctcggcagcagcccgggcagtgccgggcacatgaacggattaagccacagcccggggaacccgtcgaccattcccatgaaggaccacgatgccatcaagctgttcattgggcagatcccccgcaacctggatgagaaggacctcaagcccctcttcgaggagtttggcaaaatctacgagcttacggttctgaaggacaggttcacaggcatgcacaaaggctgcgccttcctcacctactgcgagcgtgagtcagcgctgaaggcccagagcgcgctgcacgagcagaagactctgcccgggatgaaccggccgatccaggtgaagcctgcggacagcgagagccgaggaggtagtagctgcctgcgccagcccccttcacaagatagaaaactcttcgtgggcatgctcaacaagcaacagtccgaggacgacgtgcgccgccttttcgaggcctttgggaacatcgaggagtgcaccatcctgcgcgggcccgacggcaacagcaaggggtgcgcctttgtgaagtactcctcccacgccgaggcgcaggccgccatcaacgcgctacacggcagccagaccatgccgggagcctcgtccagtctggtggtcaagttcgccgacaccgacaaggagcgcacgatgcggcgaatgcagcagatggctggccagatgggcatgttcaaccccatggccatccctttcggggcctacggcgcctacgctcaggcactgatgcagcagcaagcggccctgatggcatcagtcgcgcagggcggctacctgaaccccatggctgccttcgctgccgcccagatgcagcagatggcggccctcaacatgaatggcctggcggccgcacctatgaccccaacctcaggtggcagcacccctccgggcatcactgcaccagccgtgcctagcatcccatcccccattggggtgaatggcttcaccggcctccccccacaggccaatgggcaacctgctgcggaagctgtgttcgccaatggcatccacccctacccagcacagagccccaccgccgcggaccccctgcagcaggcctacgccggagtgcagcagtatgcaggtccagctgcctaccctgctgcctatggtcagataagccaggcctttcctcagccgcctccaatgatcccccagcagcagagagaagggcccgagggctgtaacctgttcatctaccatctgccccaggagtttggggacgctgagctgatgcagatgttcctccctttcggcttcgtgagcttcgacaacccggccagcgcgcagaccgccatccaggccatgaacggcttccagatcggcatgaagaggctcaaggtgcagctgaagcggcccaaagacgccaatcgcccgtactgagcgccggcgggagcgtcccccgggggagaccaggactcgcacagggcaggatgctgaacgggctacattaaaaaacaaacctctctctatatatatttataaatgagaactgttggatgacacctttgacatatcagccaatatcaatcaagctgaagactccagacactgtctgtgtgactgtaacatttcttcaaggaaagtatagcgtctatggagttcagagggcacgtgtttgggggaaaatatatatgacatgaagaagaagatgaagaaaaatgagaaaaaaacacacaaaaggcaactttaaaacaaaatatcacgagcagacggggaggctgaagggctgggagctgggaggagacgctgcttaccgatcccggggcttttccagcccacaaggggcggctgagaggccgccactgagcatctctatctgtcattcctttagctatttagggaccaaaggaccaaactttttattgcagatgtgtagctctatgtcaaatagagggggaatggaggaccccctccttcctgcctcatggctgttcttgaaacagcttagagcgattctatgaaaaaatgtaataaaaaattaaaaaaaaaacaaaaaacaaaaaaaacaacaaaaaaaggaaaaataacgcttcaatgcttttaaaacagcaagataatagttctttgatactttgagaggcgctttgatgaccctcatccaagtctatgacactttcctatggttttctgtattctatgtctggatggagctgttaaaagatgaacaaattggtggatatttggggaaagcaacacaaatcttaaaactcacccgtgaagtgtgagaaaacaaggaggggaacaaatgggacttaccaagcaaggtcattgttgtgaaaagtctgtaaatgcttctaactcttccccctcttaaaatcataatagttgtacag

SEQ ID NO: 804 - protein, 486 aa, Homo sapiens
MYIKMATLANGQADNASLSTNGLGSSPGSAGHMNGLSHSPGNPSTIPMKDHDAIKLFIGQIPRNLDEKDLKPLFEEFGKIYELTVLKDRFTGMHKGCAFLTYCERESALKAQSALHEQKTLPGMNRPIQVKPADSESRGGSSCLRQPPSQDRKLFVGMLNKQQSEDDVRRLFEAFGNIEECTILRGPDGNSKGCAFVKYSSHAEAQAAINALHGSQTMPGASSSLVVKFADTDKERTMRRMQQMAGQMGMFNPMAIPFGAYGAYAQALMQQQAALMASVAQGGYLNPMAAFAAAQMQQMAALNMNGLAAAPMTPTSGGSTPPGITAPAVPSIPSPIGVNGFTGLPPQANGQPAAEAVFANGIHPYPAQSPTAADPLQQAYAGVQQYAGPAAYPAAYGQISQAFPQPPPMIPQQQREGPEGCNLFIYHLPQEFGDAELMQMFLPFGFVSFDNPASAQTAIQAMNGFQIGMKRLKVQLKRPKDANRPY

SEQ ID NO: 805 - DNA, 1661 bp, Homo sapiens
agcagagagcgagcggagagcgaggtgtagagaaaccgagggggagagaacccgagtgtgtgtatgcgtgtgcgtgtgtgagcgcgagcgagcgagcgagagagaggagcgagagagtgtgagcgagaaagaataaaaggaaagaagattttctctatgtatataaagatggccacgttagcaaacggacaggctgacaacgcaagcctcagtaccaacgggctcggcagcagcccgggcagtgccgggcacatgaacggattaagccacagcccggggaacccgtcgaccattcccatgaaggaccacgatgccatcaagctgttcattgggcagatcccccgcaacctggatgagaaggacctcaagcccctcttcgaggagtttggcaaaatctacgagcttacggttctgaaggacaggttcacaggcatgcacaaaggctgcgccttcctcacctactgcgagcgtgagtcagcgctgaaggcccagagcgcgctgcacgagcagaagactctgcccgggatgaaccggccgatccaggtgaagcctgcggacagcgagagccgaggaggtagtagctgcctgcgccagcccccttcacaagatagaaaactcttcgtgggcatgctcaacaagcaacagtccgaggacgacgtgcgccgccttttcgaggcctttgggaacatcgaggagtgcaccatcctgcgcgggcccgacggcaacagcaaggggtgcgcctttgtgaagtactcctcccacgccgaggcgcaggccgccatcaacgcgctacacggcagccagaccatgccgggagcctcgtccagtctggtggtcaagttcgccgacaccgacaaggagcgcacgatgcggcgaatgcagcagatggctggccagatgggcatgttcaaccccatggccatccctttcggggcctacggcgcctacgctcaggcactgatgcagcagcaagcggccctgatggcatcagtcgcgcagggcggctacctgaaccccatggctgccttcgctgccgcccagatgcagcagatggcggccctcaacatgaatggcctggcggccgcacctatgaccccaacctcaggtggcagcacccctccgggcatcactgcaccagccgtgcctagcatcccatcccccattggggtgaatggcttcaccggcctccccccacaggccaatgggcaacctgctgcggaagctgtgttcgccaatggcatccacccctacccagcacagagccccaccgccgcggaccccctgcagcaggcctacgccggagtgcagcagtatgcaggtccagctgcctaccctgctgcctatggtcagataagccaggcctttcctcagccgcctccaatgatcccccagcagcagagagaagggcccgagggctgtaacctgttcatctaccatctgccccaggagtttggggacgctgagctgatgcagatgttcctccctttcggcttcgtgagcttcgacaacccggccagcgcgcagaccgccatccaggccatgaacggcttccagatcggcatgaagaggctcaaggtgcagctgaagcggcccaaagacgccaatcgcccgtactgagcgccggcgggagcgtcccccgggggagaccaggactcgcacag

SEQ ID NO: 806 - protein, 486 aa, Homo sapiens; identical to SEQ ID NO: 804

SEQ ID NO: 807 - DNA, 3474 bp, Homo sapiens
ccttgccagggccactgctgctgccctttcttggagcatctttcccaggatgccaaggttgcattccacgcagcagggagagcgggaactgctgtccaggggtccgcccgatgcggcgagaggccgcctgtgttttcagacgtggccagcagagggcaccaggactactgcacaacccggaccaaggagccggccgcctccagagctggattcagcgcctgggactctccggggcacagggcacaaatgtctgtgccccaatcacacagccccgtgggtgacagtttggagattcaaatgaaagtcatgatcaaggtggtgataactgagtgcacagcagaaaatgtaaggggagaagacaaatacaagaggaggaggcaaatgccagggacaaagaggcgagggcacagaagaaagcccagaaaggtcagctctagaaagcagaagattgtccccgagaaatgtgaaaatatttgctcaagttcacaacctgcttgccctacaccctacagcgcaaacctagccacagacacagaacccaaacctatgcagacatgccgggcagcttccactcccctccccacaacccagaaggccaccccgaagggcgccaggagcaccgctggctcccagtctaggcgtggccatgcctcttctaacacggggctattgtctggagttagaaggcaacacattaaagatggaaaggattcccagaagtcattaaccccaaataagaagggcctcttgttggttcctgctggtgaagacagaggacaggaatcaggaaagtcctggctggagcagttcatgaccactggagtttatgtacatccacactgcttatctgaagtaagacagtgcccagcaagctccataaatcacagagggacagcttcttcccagctgctgttctgggtcatggctgttagaaatttaaagctgatgaacgcaaaccagagtatccaggaagaaatgaaaagcagctgtgcctcatcggacacccaccaggagccctttcccagacttgacagtgaaggagacaagagaaggcagggagagggtgccacagccacgctgatgagccatgccctggagacagttagacagcccagcgaaggacagcagagcactgggccccagactgctgctttgttgccaaggaaacagcaattactctgcagaccccatggtggatgtgaccctttcagcttagctctgctgaagggtttggagcttttccaaagaagattaaccaggaatctaagcggagatgcaaaactagaaaatagaaaagttgctgaaagaaagggagtgtggagacgagactgcttcttggaagctacagatggggtcagggaaggaaaaggagagtcttgggagagcatgaagcagagtaaatggaacagggaccttgaaggagactgcctgacattcaagcggctctcagtactccctgctgccatctcatttgaagccagcaccacccacccatcttgcagacccctgaatgaggagctgggccctccacttagccgtatagacatagaagagcccgtctccaccctcactgaattgaaagtctattcagagacgaggcatcaagctggctgcgccttcctcacctactgcgagcgtgagtcagcgctgaaggcccagagcgcgctgcacgagcagaagactctgcccgggccatatcacctctatgcccctccagaaagtcttcagcctagctcaccctgcgggggtgcatttggaaagaggagaaagcttcgctctctggtcatggatgtagaaaggaagtgctgtgtggaaggtgctttggcccaggcattcgccgccggtgcaggtgtgaatgtgggcatgtgtggagcgagcagatgcatcccccaactccacatcactgtctgtgccatacaggaggagcagagaatgactctgaggagccccatgcagctacaagtagatgcccctgccgtcatgacacgaaggggagcctgcctagctggcagctcagagatctcagggtgcatccaccagggaaggattgggagaaaaatcggacaatgcctgcagggcctgtggacagacagccagacagaaaggcctccggaggagcagacacaaggcctgacacctcggtgtgaatcagctcgtcacatcctctccctggtgatagacatccaggagcagcatttgaaggccccactggatggatggctggggttgggctgctcagaggatggagtgggtgatgtgagggaacagcaccagcagcggggcttcttgggccgctcagcgctgtcccacgtcatgtctgatggctcttcagggaatgccaccatccttcctggtccgatgccagttcccaggcctgacaacattccatctcccaacattcctaaagcaggtgctcagggggcatacaatatgcgattgctgggcacactctcaccttcacatgccacatccgtctaccccaacacacacgccaaaagcgtagatggcctatgtgcagagacagctctcaccagcatgcacactgaaggtggctggcacagcgtgtgcagggatgcccacacgcacacacgaacacacaggcatgatgtcaagccctatcgtcgggtttgccagcccgaggttctggtagcccagaacctcacacacatcggcacggggagtggcagccgctcagtccagtcaacacctgaaagtggccctgaggccgtctccgcctccatcattctcattggcctttctcatcccaatattagcagccaaccaaaattcctgagagagaagagctttcaggctgggcccagtggccctccttcctggggctggagagcctgcccacaagggccggcagctcacttgacacacctgtcctccctgaaggacctgcccttcacattccggatgggctcagggcccctttacagccccactgccacagctgttgccactgacccgggcctgagtggggagagaccagagggaggaggcagccctatcgtcaggatagaggcccagccaggaagcacgcgcggccagaaggaggcccggctgctggaccaagggcagctcacggcctgcctggtgcccgcatggtatgcccgtggacgccggccaggtctaagtgatgagcagatatgggtgtgtgaagctgagtcatcgtcacagaagtggaagggagcagaggctctcagcccccagggtctccctgaattcggttctggtgacccagttgcaggcattatggtttacccctctggttctcagccttgcacactaaaagccaccctgggaccaattgtgccttggatccaggctttcaggacactcagtgtcctgccatctgcccttggtggcatcctctctgacaatcagaaaacaagctctatgcaaggccctgaggggattcaggcgagaattcactacgtggaccagccagcatttattgagcatggaccc

SEQ ID NO: 808 - protein, 1068 aa, Homo sapiens
MSVPQSHSPVGDSLEIQMKVMIKVVITECTAENVRGEDKYKRRRQMPGTKRRGHRRKPRKVSSRKQKIVPEKCENICSSSQPACPTPYSANLATDTEPKPMQTCRAASTPLPTTQKATPKGARSTAGSQSRRGHASSNTGLLSGVRRQHIKDGKDSQKSLTPNKKGLLLVPAGEDRGQESGKSWLEQFMTTGVYVHPHCLSEVRQCPASSINHRGTASSQLLFWVMAVRNLKLMNANQSIQEEMKSSCASSDTHQEPFPRLDSEGDKRRQGEGATATLMSHALETVRQPSEGQQSTGPQTAALLPRKQQLLCRPHGGCDPFSLALLKGLELFQRRLTRNLSGDAKLENRKVAERKGVWRRDCFLEATDGVREGKGESWESMKQSKWNRDLEGDCLTFKRLSVLPAAISFEASTTHPSCRPLNEELGPPLSRIDIEEPVSTLTELKVYSETRHQAGCAFLTYCERESALKAQSALHEQKTLPGPYHLYAPPESLQPSSPCGGAFGKRRKLRSLVMDVERKCCVEGAQAFAAGAGVNVGMCGASRCIPQLHITVCAIQEEQRMTLRSPMQLQVDAPAVMTRRGACLAGSSEISGCIHQGRIGRKIGQCLQGLWTDSQTERPPEEQTQGLTPRCESARHILSLVIDIQEQHLKAPLDGWLGLGCSEDGVGDVREQHQQRGFLGRSALSHVMSDGSSGNATILPGPMPVPRPDNIPSPNIPKAGAQGAYNMRLLGTLSPSHATSVYPNTHAKSVDGLCAETALTSMHTEGGWHSVCRDAHTHTRTHDVKPYRRVCQPEVLVAQNLTHIGTGSGSRSVQSTPESGPEAVSASIILIGLSHPNISSQPKFLREKSFQAGPSGPPSWGWRACPQGPAAHLTHLSSLKDLPFTFRMGSGPKPTATAVATDPGLSGERPEGGGSPIVRIEAQPGSTRGQKEARLLDQGQLTACLVPAWYRRRPGLSDEQIWVCEAESSSQKWKGAEALSPQGLPEFGSGDPVAGIMVYPSGSQPCTLKATLGPIVPWIQAFRTLSVLPSALGGILSDNQKTSSMQGPEGIQARIHYVDQPAFIEHGP

SEQ ID NO: 809 - DNA, 333 bp, Homo sapiens
atggggccgtgccgtcgaggggagacgggcagcactttggtgaagatgaaccggccgatccaggtgaagcctgcggacagcgagagccgaggaggtagtagctgcctgcgccagcccccttcacaaagtttaccgggaaatcaagggcaaaatgtcgagcaggtgaaagctacttgcaaatttggagagccagttgtcctggagggtgctgtgtgggccgaagaggatcagcagccagacaggggccctgaaggaggggacgagtggctgatacctgggtcagacagcctgtgctcctggctgctcctgaccactctgaaggaaaaagtggac

SEQ ID NO: 810 - protein, 111 aa, Homo sapiens
MGPCRRGETGSTLVKMNRPIQVKPADSESRGGSSCLRQPPSQSLPGNQGQNVEQVKATCKFGEPVVLEGAVWAEEDQQPDRGPEGGDEWLIPGSDSLCSWLLLTTLKEKVD

SEQ ID NO: 811 - DNA, 2490 bp, Homo sapiens
agcagagagcgagcggagagcgaggtgtagagaaaccgagggggagagaacccgagtgtgtgtatgcgtgtgcgtgtgtgagcgcgagcgagcgagcgagagagaggagcgagagagtgtgagcgagaaagaataaaaggaaagaagattttctctatgtatataaagatggccacgttagcaaacggacaggctgacaacgcaagcctcagtaccaacgggctcggcagcagcccgggcagtgccgggcacatgaacggattaagccacagcccggggaacccgtcgaccattcccatgaaggaccacgatgccatcaagctgttcattgggcagatcccccgcaacctggatgagaaggacctcaagcccctcttcgaggagtttggcaaaatctacgagcttacggttctgaaggacaggttcacaggcatgcacaaaggctgcgccttcctcacctactgcgagcgtgagtcagcgctgaaggcccagagcgcgctgcacgagcagaagactctgcccgggagaagatagaaaactcttcgtgggcatgctcaacaagcaacagtccgaggacgacgtgcgccgccttttcgaggcctttgggaacatcgaggagtgcaccatcctgcgcgggcccgacggcaacagcaaggggtgcgcctttgtgaagtactcctcccacgccgaggcgcaggccgccatcaacgcgctacacggcagccagaccatgccgggagcctcgtccagtctggtggtcaagttcgccgacaccgacaaggagcgcacgatgcggcgaatgcagcagatggctggccagatgggcatgttcaaccccatggccatccctttcggggcctacggcgcctacgctcaggcactgatgcagcagcaagcggccctgatggcatcagtcgcgcagggcggctacctgaaccccatggctgccttcgctgccgcccagatgcagcagatggcggccctcaacatgaatggcctggcggccgcacctatgaccccaacctcaggtggcagcacccctccgggcatcactgcaccagccgtgcctagcatcccatcccccattggggtgaatggcttcaccggcctccccccacaggccaatgggcaacctgctgcggaagctgtgttcgccaatggcatccacccctacccagcacagagccccaccgccgcggaccccctgcagcaggcctacgccggagtgcagcagtatgcaggtcctgcctaccctgctgcctatggtcagataagccaggcctttcctcagccgcctccaatgatcccccagcagcagagagaagggcccgagggctgtaacctgttcatctaccatctgccccaggagtttggggacgctgagctgatgcagatgttcctccctttcggcttcgtgagcttcgacaacccggccagcgcgcagaccgccatccaggccatgaacggcttccagatcggcatgaagaggctcaaggtgcagctgaagcggcccaaagacgccaatcgcccgtactgagcgccggcgggagcgtcccccgggggagaccaggactcgcacagggcaggatgctgaacgggctacattaaaaaacaaacctctctctatatatatttataaatgagaactgttggatgacacctttgacatatcagccaatatcaatcaagctgaagactccagacactgtctgtgtgactgtaacatttcttcaaggaaagtatagcgtctatggagttcagagggcacgtgtttgggggaaaatatatatgacatgaagaagaagatgaagaaaaatgagaaaaaaacacacaaaaggcaactttaaaacaaaatatcacgagcagacggggaggctgaagggctgggagctgggaggagacgctgcttaccgatcccggggcttttccagcccacaaggggcggctgagaggccgccactgagcatctctatctgtcattcctttagctatttagggaccaaaggaccaaactttttattgcagatgtgtagctctatgtcaaatagagggggaatggaggaccccctccttcctgcctcatggctgttcttgaaacagcttagagcgattctatgaaaaaatgtaataaaaaattaaaaaaaaaacaaaaaacaaaaaaaacaacaaaaaaaggaaaaataacgcttcaatgcttttaaaacagcaagataatagttctttgatactttgagaggcgctttgatgaccctcatccaagtctatgacactttcctatggttttctgtattctatgtctggatggagctgttaaaagatgaacaaattggtggatatttggggaaagcaacacaaatcttaaaactcacccgtgaagtgtgagaaaacaaggaggggaacaaatgggacttaccaagcaaggtcattgttgtgaaaagtctgtaaatgcttctaactcttccccctcttaaaatcataatagttgtacag

SEQ ID NO: 812 - protein, 328 aa, Homo sapiens
MLNKQQSEDDVRRLFEAFGNIEECTILRGPDGNSKGCAFVKYSSHAEAQAAINALHGSQTMPGASSSLVVKFADTDKERTMRRMQQMAGQMGMFNPMAIPFGAYGAYAQALMQQQAALMASVAQGGYLNPMAAFAAAQMQQMAALNMNGLAAAPMTPTSGGSTPPGITAPAVPSIPSPIGVNGFTGLPPQANGQPAAEAVFANGIHPYPAQSPTAADPLQQAYAGVQQYAGPAYPAAYGQISQAFPQPPPMIPQQQREGPEGCNLFIYHLPQEFGDAELMQMFLPFGFVSFDNPASAQTAIQAMNGFQIGMKRLKVQLKRPKDANRPY

SEQ ID NO: 813 - DNA, 125146 bp, Mus musculus
  misc_feature (1)...(125146): n = A, C, G or T/U
tttgggagtttctaaattcgggatttctttagtccaaaaaaaaaaaaaaagttgtctattttctgtttgtcttgcaacagggaatggcaaaggccacatttgcctcaaagttgcttcataactgagcatgcccttgacccttgtgcgtctgtctcctgagtgctgggattacagggatgtgccaccacactgacttcattcactgctggggatcaagagctagggaggcaagtgccctcctgactgaggcacatccccagcctgattgccttctgtctattgaatgtacgcattagcataggcaatgtcccagtgcattcctgactccgagaggttcctggggagctcttcatacacatggacattctgaacaaattcataccaaacattcttaatagcctggtttctaaaaacatgtccagacatggactgcatgattcatttgctaactcttagaccgtttcagattagtttttatatatgtcaataaaagcctgggacgtggaagaaactgaagtgtttcccatagttactatccaggataggccaccaccctgtgattaatgcaaaactcctctttgcagtacttgtgacaggaggcagccatgccttccattgacacagcacagagccaagggttcactactgaacctcgggtatgcaggtggcaacttccatttttcccaaaggaggcttttgtgctaggtcctaacagtcacctctgcaatgtgactttcctctctactctgtcattctccttcaagacttctaagactcaaccagccttggctgacactgaagccccagtctttgcttcctctacatcaatgttcatctccttcactcccagaccgctcctctatctctgtttgagcgtggcagtcaatttaaattgctgcttccccagagcatagactgattccttagataaagctaccctttcttcttcctaaagtcatactttttgtacttattaccataaatcaattccttttcagtttggcgggtatcttatcttccctaggaaatgtgaaccatcatgagggcagagatgacaatgtcttctgcctcctcctgtcttctgagaaccttaaaaagcacagtagaggtttgctgaattacccgatgaatggcttaaacttaatcacggaaaatgaattaatacttatcaaatatctggtgtaattctgtgcacagggtgttatacaggtgtttgttaaataaaatgaaaggttgatagaacataagcttggatttaggagggctattgctatcgtaattactggaaatggtgcctataatttattaacaggctcagataatttcctctttattaccagattcctacgaatgtggaatcatgggtggaaacagggctttctttttatattctgttcctttttctaattacatatcatttctctcacagtgatagttaaatctcattatatttaatgatttatccattttctgctgtaacagttttatcagcaactccttgtattataatctcattattatttcacaaaattatatcctatttgttaagaacagtagctgttaccatgattttatctccagtgctcttttccgtgtcaatgtcttagccctctttgtataaagattaaacattttcttctctccctttagtcaaattctgttcaatgttgcatatataagtgtctttccctctattttgctattttctttggagaattgaattctccatctgaactgtgcaggcctcatttatacagttctatgttttgaaggcctaagatggtgtgaatcgaggatatttaaataaccgatattttttctttattctgaagtataatatacctgcaatgaaataccagagccgtacttcttaatttctactgactcagttcccccaacgggactgacatttttacttcttgaatcagatgtactttgtgggaggaagttgtaacatgttcacttaagtctcagaactgcatgctggaggagcagatagatcaccgcaagcctttcatgtgcctttggttagcaaaacaaaacaaaacaaacaaacgaagaaaaccaacctgtggcaatataggatagggttcagatgcaatctgtagctggcttgcacatgttatgtgtgttatactgtcacttaaagttgcttccctatgtcagggtaatgtgagaaagttttcaatgccaagggttaaattgtacttctgaaaggtgcccctcccccaaatccttgtagctttctttcctttcatattttaatatagagaatggcataatacactgtatgagtaatttacgaaataatttattctttgaaaaggatggtatatatttatgtgtgtgtgtgtgttgtgtgtgtgtgtgttgtgtgtgtgtgtgtgtgtgtgtgtgtgttgtgtgtgtgtgtggtgtgtgtgtgtgtgtgtgtgtgtgtgtgtgtatgtgtgtgttgtgggggtcgaaggtgagagtaatgtgtatgtgaagaccactgggcagcttttgggagtcagttcccactttctactttgtctcatttttgttcttgctccagttgttgcttgatgttgctgtgctacaaaatccagacctgaaaattcaaagaaatgctttgctttctgcttctcctagaagtgcacgggtgcttcggttaaggatgtgtgcagtgccatctggatttaatagtcttgggtctgcagcctcatctttgacccactgagccatcctccccaccctatgttattctttgaataagacaaccaagtgcacatatacatcgcttgcctgggtacacgttcctgaatcttaggaccagagaggagacatgttgtcgcgtaactgctcatccatcagcgtcgcgttttgtaccagacatagactagatctttagtggaagctttgacactttgtttctctttgatatgaaaatatttggattctttcatccaggaaaagaattcattccctctaatgctcctgagtgtaacgtaaaaagctttatgatgctggcacacagttttgtgacaaggcaatagagctgtgacgcccacagggttccggggttcaatctccatttcttcatctgatgagactcgtacttagctttctggtctgctgtaaaggttaaatacattaacttccaggaagaattcaggagagtttttggaatgtgttcattaggggtgttcccagctgctgtttcctcgagatacaaatctctttttgtttgtatattgtttggttttcaagacagggattctctgcgcagccctggctgtcctggaacttgctctgtagagtagtctgacctcgaaattagaggtctgcctgcctctgcctcatgagtactgggattaaaggcattgcaccatcactgcctagctaacttaaagagttttaacctaaaacatttcagtacagggtattgcatggttacaaattaaaatgcaaatgtttctttgttctgttcaattttgtaggagtcctctaagaagcagggccccaaagtgagaacctgaacaagaagaatatattagatgagaggtacattaaaatctatttttaggggctagagatgtatctcagtggttgagtacccgatgctcttccagaagacccaagtttgagtcccagttcacagctggctgtgacttcaattccaggggatcttaagtcctttctggcacctgcacacacggggcatacatttacccagaaacatatacagaaatgaggataaatcttaacattctgtgtttaacagcttcccaacaagattgttatgctctattctttacagggtgtgtgtgtgtgtgtgtgtgtgtgtgtgtgtgtgtgtgtgtgtgtgtgtgcaaatgtgggtagagaatgggggatgaggaagagaaggagaaatgactaaaataatttcattagaggaggacccatccaacaggctagcctgccagcgtttgttgagccctagaaagctgaacaacccaagtccaggagccatccaatcagaaggctgagagccacatttccataacgatgattggctagtagtctggagactggcggagctgcagggggatggggaagaaatgctctcctgagaaaatagcagaacaactttctgttgtttactgcatattctccaaatgattgtagtgattcatcctttaggaaggcttgtttagcaaacaaaagaggcacagttgttctcaacaacagtagcattcaaccgccaagaagctgagcaaaatggaagtctttaaaatcaactttaggctccctgagttcttctagctgaatatgcaaaacctgtctaggagaggcatgaggaacataaatcactaattcgggtttgctggttttgatgaacgccaccgttgctttattaaacgtgtgtcaactttatgaaatctgaacaaagtggagttcatcaagtatgaaaatcctttgaaatataccgagtattttcctagttaggggggttctgccaccctcaataacaaagttgtcctgagtatttctttttcctcctgcagtcatttatacatgaaaaatcttagagatgtattcatcaatgtgttaacgctctcacaaatttttatacttatacccgtctgctctcagtaattctctccacaggacaaagaaaaggggaaatgtaatggctgtatccaacagcctttgtcctttcccaacttggtgttttttctaccctgttgttttaaattcacaccgagttgtagctacatttcacctacaagtttttaaattttgttttacaaacacccctccacccccatcgtttctccttctggcaaggaggctagccccgcaaagcagactaagcagaagtatttttcagactttcccagtgaccattccttggctggctaacagaccagccattcagaagcaattttcttcaggctgaaattatgtgctgaccgtagcagatcacttcccataataacccttcccccacccagcgctaaatacaatctgtctcctactcactgtaataacgtgcaaatgactgtaatttcgcagacaagaaacagcccaaagtgaaacgtgtctaaacagaggtcgatttgaaaaatcagggctattacctaaatctgtaaaatacatattgtaataaaaccagcaacagcaatctccaataagtagttctaaaaaacgcagcttgtgttttgatcttctttatgcacccggtcttcagaggcataaaagagacctccctcctttcctagaaatgctttcatggcatgtgatttcaattgcctgactttcctagctgatcccagaccctgctagggcacccatgcagacacagtagccaacaccaccctgctggtgcctagggccaagatgaggtatgatttgagacacttaaggctgacctacctacattgctgttctcttaacgcaagtattatacaagtattttttataagagagacagagacagagacagaggggaagagagagacagagacagacagagacagagacaggtggggggagagagagagggagagggagagggagagggagagagagagagagagagagagagagagagagagagagagagagagaggggctgttttgttaggttttctcacagtgaagcatagcaggagcagggtgctgccttttcttcacccattaagcaactggacctgcagaagaacaagagctagtccagcatacagagagaagccaccctcatctttctccttctgtcttggtattgaacccatgccatcaagtaggagaggcaaacactctaccatggaactatatccctatatttttattttcttgctattcaaattcattgtaatattaaatcacttgatatagttgccttatattgtctacagttgtttaaaccaagctagattacaaagagctgtcaagactgcatgaatctccatctttgtgggtcaactggtgagacttcaggctaaaatgtgttagtaggacataaaagctacctcaaaaactaatgtggtaatgttagaaggtatagaataatgtctgtatttgtggatgtctgtcagaaatgtgtttttcgccaggggctatcatgaggtcttttttccctcacctctttctaccaaggacttgaaatggttctatatacaagatcttttttccccttggaactttgttttggtctaaggttactttaggattatgcacactatcaaatgtttgcccaaaatggcaatatttgactctgcttatgacaactatccccagatagatattgctaaaagtattcaatggaaacttgagtcggaggtgtagcaggatttttttgtttgtttgttttgttttgctttttccctccctcttttcagaagctctttatcaactaggaacaatgatctgtaggtgaaaagagtgaagaccttctaatgtctctgtgggtgtttccttaatcggctccatagtctctggaagggagcggaagccaaccagtgcttaagggctccaggtggacaagagtcattccctagagttctgttgggtaaccaatacatttatagttacccctaacttaagtctcttgcctgcaaattaagcttatataatttatattttaggattttctcttctagtttttgtctcaatcttgagagctcccaaagaacccccaagcttgtgttctgtgtagagttagaaaagcttcgacttgcttccaagtaaatacaaactcaagaaagaggtctgctggtcttgagggcacattctatgatcctaccactgggaaagcagagactatcaagtgcctagctagcctgggcggcctagtaaattgcttgtagaaaaaaaaaaaaaaagaggtggtggtgctggtggttataaaactggttttgattgcctttaataatacaacgccaatcagaagaaagaatcacaaacaaaggtcgctttgattttctgtgttgttgcctaaagctgttcacctcctcttcagctctttccaggaaaaaaaaatagaaagaaaaagaaagaaagaagggaagagagagagagagagagagagagagagagagagagagagagagagaaagggagaatggagaaaaggccaagttggcaagattcttccacttccttgttaacgatgtgttatgtgtagtgctgagctgatttggggggcccatggaagagcgatgacactctctaattaactcttttacactaacctcatgtctcccccatccctcaactccgaacactgttcctttttcccagacatctcctccgtctctcgtgtctctgggtagacacctggtgaaatgtaaaattacaaagtctacgtgttaatagagtgtactggtgtgatcaaggaagtgcagtggatatcacttggaagacaactacaccccctggtacattactttgataagaaatatatgtaataataagaggtcatgaatttgaaagggaatagagtgcacaggaagaattggaggggaagagacagagaggtagaaattatgtacccaagtataaaattctcaaagagattaaattaaaaaaaattaatcagaatgaaaaatttttcagttctgtaaacagagccaaactttccaattttgtgaggtaactccacttgccaaggctggtagctaattatctttcagccttccattatctgagagtcttcacatgcctcctgattgtcctccaccccttgtcaagcaaaacaaacacatgcaaagccagtataacaatagtagtctattcaaaagttgcctggaagaatttgggaggtggaagagacagggtggggaataaagggcctgtgggaatcataaaaatgggggaaaaaagtgctttgatttgccaaaataatttgaattaaatatgtactcaagttggccttccttggccaatggtgtttatctaaaaagactataggtttaggtttggctgtagaagacagggctaggttcagttacacatctggatggttacattttggatctggtttgactccctgctttctttagtaatgggttgttttgaaaaaactttaccctctcccttttttacccttttgtttcaagagataatagttgattttttttttcttcctaaactaatgtcacatatggcgtaaccacagcctgaaatggagacaacaccccagggacacaggaagcacacaagtgtgagttagtctttggaggaatcacacttctaaaagaagaaaagttatgacttctgtaaggtcctgtgccattcccaaggagccacacataaatgtaaaacctgtacagtaaaaataaataaataaataaataaataaataaataaataaataaatactacccagaagccagaagcagaatagaagatgagcggatcctaggtgtctggtttgtcctgaggatttgttattgtacatcttcaatgtgagtaagagaggagatgacatgatccctttctgtgtctcactgcagtcaaggtcagaacttgcagtctgttgcttttttttgcagcatctactctagttcatctaacaaattggcatttttttaaaaatggggtaaatatattaaaaaaacacaaacattagtcaatagccattacttataacatgtggcataaatgtttttattgatccacaaagtcgcctccaaacatttacatcatagttgtcttctgccagaggcaatttactcttgtgtgtccattttcgtaagctatggcatgtctaaaactccaattgtcaactgaaaactgcagtaatatccgatctttcaaactctgagtaataattggtttgcttgaaacccaaagactaagtgacgttaaattccccacattctagctcctacaataattgaaaataacaacgcaaacttaaaaataaaccatgttctaaagacttaatatgtaagactacattagtttaaatatattaacgggctgttttcacattagcctcctgtcctggaaaatgagtcccattaactcggctgtgtttgtcttaccataaaagtgggaacattttgtatgtttgtgnnnnnnnnnnnnnnnnnnnnatcgatttattttttaataaggctcatttgagatgttaatgtggtttgcagaggccttcttatctatctgtctgtctgtctgtctgtctgtctgtctatctgtaggtcgcagaagattggttggataagttggagggactcattggtaatttgaggagaatctttcagtggttttgctgaatggtgatctgggtccacagttcatggcttgcagatcagaagcctggaaacaaaagggttacttgttctcccatcaccggacgctccccactgaatttttttttatttaatgagagagagagagagagagagagagagagagagagagagagagatttggggtgggggtgggggaaaggattacaggaagggcaaggtggtgggggaagggctgagaggcaggagctgcagaactgggttgccgagtccttgggacttggaaggggccacagtaaaccgctcgcctgggtttccaccgcgcggcgtccccgctctgtgcgggtggctctcagctggcttccctctgccaccgagcgatcacacacattatttcccccaagataacacaatcaaacttgcatttaccgatatcctctcttcgcagcctgcttgagatgtgttttaataaataagtgttttatgtgaatgatgtagtaattgaaacaggcgccccattttcccccctcccttcgtcctgcgggaggttttgcaaccccaatctgcttggaaaataaaacgctttgtctccaccgccaccccccaccgcacccccacccgcgctcagtgtgtgttttatacgtgtgtatatctcaaccccctacagtagccaagagaaagcagctagccaatgagagagcccagtttcataaaagctgctctctgattggtcctgtgcgaaagggcattgggaacaaagaaaagtccctttcaggtatacaggctgagagctcctttggctccactccccctgtgcgtgtgttgtgtttcagttctgattccactgttccagaacaagcttggtgtgtgtatgtgtgcaccggggggatttctgtgttttggttttttttttgctttattttttttatttttataaaaaaatacacgggacggtctgtgacatttgctggtccatctttaataaaaaaaaaattgaagaaattataatttccaaaataaagaggctacaaccaaacacactcaatgcagttagaaggaaaaggtcaactcgctcccatacagaccgtaagtacggttgcgtggtgtgtcgctatatagcactttagtggggtattcatgcaggggaatgtgcgagttttatgcattgaaatgaggaactagttacagggtttggctttgcatttagaacagcccaagaagggtgaatttgattcagtggaggggactttgtaacttctttggacaaattaagcttgactgggcacttggactaacttagagtaaattaccttttgggctcgaacccaaaggagactaagagtgattcggttacacaccctggtcctccgtgtcaggtctcttgcgcaccttccccctcctttccctttctaccggagctgagctgacccccgcccagaccgagccaggcaaatgggaacccgggtagaacaagccgatttctctcctgtcacatcctcctgctcagtaatttaatagtaaactagggaatattcatccattacatgtaatgactgtaactaccattttccacctttaaaaaggcaaggaaaaaaaaaacccaccattaagagaaggtgtgtgtgtgtgtnnnnnnnnnnnnnnnnnnnncccaaacaacccccacaaatagtaacaatggtgtgtttattacaagtccctgtttgggagctagcaaaatgtttttctttgtttaatacatgaaggggagggggatcctaaatcccagcagctcggaggtactctgcccgcccccccccgccccccaggcgtccgctgcattggcccccttgggaaagccgacaaattggagatcagttgaggagaggtttataagctgtttctttaaaacatctgctttgctcttgtggccattacatttccctccttccgaacttccgagatcctagatggctgagaaatgtttcacattcataacttgtagcttcgcccactgtagggcgtgcagggggaggggggttgcagcggggagggagaaaccttcagctttttttttaaagaccagatcagtattttcttgatacgcttgtcaccatttttgttctcacgacaaccaattgagcccttgatcctcacgtgatgtgaaaggcttgcactgtaacaaaaccgctccttttagatggttggtgttgctaacgcgcccatcccccactctcccagccccgacatttccagcaaagcgactctccacttccaatccatcaacaattcattactgcttttagcttccaaacgccagctaattaaaaatactaagccaagctccgaggccatctgactaaacacaggagggggtgggcgagaggtggagagaggaggagaaaaaaaatagagacgcactgtttgctgtgtgtagagaaagagaaattgtcctggagaaaggtcgcctttaaaaaaaaaaaaaaaaaaaaaaaaacctttttgactctaattatcgaattaccacatgacagatcggcttgcgcggcggaggattttaacccctcctcagggactattctaagaactcggttctttttttctcaaaaacaacataaaacaggaaaacatcacatccttcaggtttccaagacagccccttttagacgccgttattttcccggctccaccgccccccgccccgggcgaaagctgctctaactggtttatcagctccctgcatcgtctgctccctcctcctccacacctttctttttctcctccagccgggctcctcatcccaccctttcttcttcttcctcctcctccccattctttcatcccctccttaagttagttggagaaatcaaatgtcaggacgagcggaaaaatgccacttcccgactaacaggcggaatccagcccagattttcagtcctttcttcttattctttcttccctttcactaatttatcccgatgttagcacattctgtctcgttactagaggacgcctgtaggttggctacatgagatcattacttactgatcacggtgactctgaagtctgcaacagaaagcggaatgagaagttcggaaaagttttttctctaatnnnnnnnnnnnnnnnnnnnnccctcccctgcccctctcctctccctctctctcaacaccctattattctgaatgcttgttaagaggaaaaacacccttcggtgctcgggttgtgaacgtgaagcatctctcagctgcacagtgacacattttttttaaggagaaaaggactccagagctttttgccaaatgggggatgggggagtggaatgatgttactgagtgattattttggctgagatgtgttacttggtttcttcctttttgatcatttggtgtttaagtaaaatgaggcacagggctgtgtgcctagtggactgagaaatgcttttttgatttgccggcctaattaaaaaatgataaaggatttaaaggtaagcattccctctctctctctttctgcgtctctctctttctctctccctctcactgtatttatttattttcttgacaatcaactgttaaaagggggctgatccctttaaaaaactgttttaactgctctttgtcaaacacacactcatttgtggtcactgaggccaccttggcgcagaccacttaaagtgtatgtcttaatcagtttccctacagtcagtagcaccatatttaacagactgagcagttctgtgacccaggggtatggaagaattatttagatggatttttctttttcttttcttcttcttcttctttttttttttttcctcaaaaaggaagatctttaaccttttccctcatactgtctttttactgagaaaaatactcttaaagagatctgtgcatatttcataaagaatgtgtagcttttggggaagggggtggtaggtatgtgtgtgagaggggaactgttgtttttctgtttcttgtggagaacaaaacattggttgtctagacaatgtgcaagaagaagtattaaaattagaaataaggaaaacttagtgacatcattttgaacactagtcctagagaactttgagggcctgtggtgttttttttttttttttttttttttttgttgttttttgcttgttttgtttttttacattgcaagacccaggccatgcttagggaatgtttaacagggtgtttttcttgtatgaatatccatgatcttttcctagggtagaaatagcacatgtgccaggcaaaaataaaaaatgttcaacttaaaaaaaaaaaaagccacaaaaacctttctgggcttgaatcagatccttggagatattttaatgcttttaaagaactggctatccccctgctgtttagagggattttagttttagctactgtaagatgcttattgtcggggaaagggggggtgcttttcaagtctgcttgttttcctttaaacatggtattggactgtggaggcaataatgagcccccagctctctgtccttctctgtgccccttcctaactcctcagtattaatggttttctatttcggtaatacccagacaagaaatattcgactttttccccccctccacaggagaagctggacctcgagtgaaggaagtgagatccctggacacatttttgggggcaggaaaaagaagaggaaaattgcaaggaaaaaaaaatttttttttctttacgagaaaacccagaggagctaaacgaatgtcccctcatccctcaaagaaagttcatcgggtttttaatctcgagagctcatcttcaggatgtccgtgaacgtttcgactgcaggaaaaggtgtggatccaaatacagttgatacttatgacagtggcgatgattgggaaatcggggttggaaatttaatcattgatttggacgccgatttggaaaaggacagacaaaaatttgagatgaataattccaccaacaccactaccaacaccactaaggattgtggaggtccggcctccaatgggacctgttctacctcagccttagctgatggcctaaaatttgcttctgttcagccctccgctccccaggggaattcacacaaagaaaccagcaaatcaaaagtgaaaagggctaaaacttctaaggatgctaataaatctctgccttctgctgccttgtatggaattcccgagatcagcagcactggcaagaggcaggaagtccaagggcgccctggagaggctactggcatgaattcagcgctgggtcaaagtgtgagcggcggcggcagcagcaacccaaacagcaacggtaccagcaccgggacctcggctgccaccgcgggggcaggctcctgtgggaaaagcaaggaagagaagccagggaaaagccacagcagccgaggcgccaagcgggataaggatgctgcgagatcccggaaagagaaacacgacctgctgcagggccaccagaatggcggcggaggccaggccccctccggtggtcacctctatggctttgggaccaagagcaatggaagtggcgcgagcccctttcactgtgggggcgctgggagtggcagcgttggggctgcaggggaagttagcaaaactgctccggattcaacgctcatgggaaactctatgctggtcaagaaggaagaggaggaggaggagagccacaggcgaatcaagaaactgaaaactgagaaggtaggatacgatcgccttcttgtgtgccccccactctgtgtgcatttgtttggggttgtgggatgtgcctccaggtgtcttacacttcctagtgctttcgggttctccgtgagatttctatgacgttcatcctttatggatgctatcccgagtgcagattttggctcttgcttctgctgcttgcttctgctggtggtgccagcgtttgaaaggtcatagggtgggaggctctgaatggtccaagtgccttttgccttcttgtaagagcgactgggcagccagcaaattgtccgtgtgtgctttgaccagaaaacctgctgcggcactagcttgagtttcgtcctggtttcttccctaaagagaattgtcgtctgtgttattgttaaccgtgtgtctttaggaacagggttctagttccctctgtggaaagggagtgtgtagtgttattgacactcattgttctgttactttcccccaaatagttccgtcaaaggatgtactccaggctgggagtattgatcactgactttgtaactatgcagtcaaactgtgccagttttgggtgactgtggagacgctctctactttgctctctcacccactgcagctagagccgtgagactgttatcacttcggtctttagcttgcctgggcagctgggagattagtaagtaagactcggaaagcacatttggcttgtgttcttgaaatgtgaggatccgaccaagggggccattggggcagcagggaagccaactgtggtttaacaatgcctgacgtgagccatttggacccctgcactcttgttgttcattgtcttaaagtctgtggttagacactgtgctggaaaccccctgctccagtgttaccttgattaggcatggaggcctggggtttgcttgtctgagatgcagttgctttggggtaatgtttgggaactggcggctatgtgtcctccaggctcattggttgggaggtgagagtggtgtttctgtgaaattaatctttagactcattccacaagttgtagcatgaagatgtagtgtttctatcaagtggttgtagtaacgtgatttcttctaactatgcttattattgtggtacgattatgtttcccctttctggctgtaatgatgcgaagaagtctcctggggattactcctgcatgaaataacacaaagttctctgattccctttattttcaacttcaggtgctcagagttaaagttggaatggacataggaataaagttctgattgtaaacactgatggaggcagagagaggcatagacaataccgtcaaacttgcaaaaggctactgattgcttttggaatccaaatcctcttagccttttacattgatgaatttagatcaatttaaaaaaatctcaggctttgcttcttactttaaatgtgtggtttcacataatttctactaaaagacagtttgaaatcttcttattacttagtacagtgggacatttacttttgttgccaatagtcttcaaattgcagctttaatctgctttaactatctggatgaattgccctaatccagtgctcacaatgctgtggttaaggagtcagagctatttgattggatccactggctgctgggaatgtgggaggttctggccttttgcattccccttagccttttaatcttccagccaaatgttcacattcaacaattttgtttagctggcgatcggaacatttcaggatctcaaaggctgctgtcatggcaactgagattagtgcgtggtgtcggctctccagtttgtgttcctttggctccccagtcacagagggaagtggctgaagaatggagtggctgaattattcgcacgcatgcaatgcgtcttcaggcagagcagtataaatggcatcctatgaattccataaatgaagagcgaacaagtcatgcccggaagcaggggtggaggtgggggcagggaagagagaggacgcggccctgctgtgtggaagccatgctccaacctcagccaccagagttgacccagaaatcattttaggatggtttcaggggcctggaaccttcagtgttagccactcttgccaagctgaggggttggcttgggatcttaaacattggtccttaaacactgccccacccccacccccaaaatgacttcataatcccatccatccttgtctctcagagatgacaactccctggcatgatagcacccagagaagagagcctaatcccactaacttattgggtatgtcaaattaggctttgttttagaaaatacagtggccgaaggatgcctgtttaggaagctagaacttaagagggcatacttgaaaacatgcttcacatctgaggcctcatgaaagaagtttttttttttttttttttttttttttttttaataaaaacattctatatgctttaagttcaacatacttgaagaaccaggttactggagcataggtaccttcagaggcaagatgcaacaagattttctggtttttctcttcttccttccttcctttctttctttctttctttctttctttctttctttcttttctggttggaaggttaaaggagattcataagatgcgctgtcactgtttaattttcacagcatgcttaactgtctatttttggtctgtttactctgtttcttcactacccagggtcatgtaaagcatgataaattggaccttatgaaacctaattaaatcaatgagtgttctggctcctttatgtggaaaccacaagtatgttgtaaaattcgccactcccttaatacgtgaaaaaaaatcaaaacaaaccataattccaagatgtttgagctgtagctctatagcccattttgtggttaagccaccagtgacatgtctgcctaagtaggtttgatgagttggcttttggttgttagaacctgcctctccaccttccattcctgcctttcaaagcagaatggtctagcattgaagctgtttgcatatctctcttcattgtcttacagtttagatttatcagaaaaggaactattgggctggtttaaatagttatataaagtactgttacaatcagtggaattatttaatcactagaatactgggaaacacacaagaaaaaaacaaaaacaaaaataaaaacaaacgagtcttaaaaacaactgacactgaaacagaaataaatgaaagtcagatagttgtgtcttaggattcttctatgcagtgcgtattccaagaagggttatttctgtaatagataaactcttttcatttccattgccttgtcttctgaaagatggtgtctataaatggacctgtctataataagatatcattcattttgttttattctcttgtagaaaccttttttacatgtcactagggaatcctgacacattctctaagtgcatgtgagcagtttaagaacatattttgattaatgacttttgtggctacatccccccactcccataatatagtgcgtcctgtgaattagggagtgcatttgatctacagaggaatgaaagggcaggaaggtcactggctttaatgaaacaactgagaccattataggtggacagtgtgttgttttgaaagttacatatggatttagctaaaggtggcttcctgtcagcaccaatcctccttccggttcaatccaatagacaccctgggaggtgaccaaggggctgtctaaggtgtctgtaagaacacacgaatcttggaatatcggtattatcggttccatcattgaattttgagttgaacatttgaaatgtgttaggtttgttggaggagaaaaaaaaaactgtgaaagtatacacaattgctccagatcgagctaaaaaaagataatgttcagctactttaataacttggcaaatagttcataacactaggagagaagggcagggggaggggtgggtgtccaaatgtcttaaggttaagaatatgctctcatcaaggaaaattgtttgggtgcaagatggttttaattaaaatgttataaagacttttttttttcctaagcagcacttttatagttagtaaattgagtgaatgctgaaagtgctaagcagaaatctccttagccacggaggtgttcaataaccagactcaaacaacagggagagtaccatctgttcttggtttccagcatgaaacacagggattgaatgaatggctgagatttgccccaattttgacaatgtctgtgctagtccacctggtacttcatagaaagttgaaattgcagtaacacacacaccactgtgaaaacatgtgttcccacttttttttttaaccagttccacttttttctctattttgggggagggtttcctgaagctcagccattggctacttcctacagccctcttctactttctagaggccctcacactgagggggtcagtgcttcaaagatctaaatgatcctgtcaattttcctcctgcaggctatgggggaaaagctccccagggctcaccctggtcatcactcttcattaaactaattttgtgtggtagtgctgggcactagtgtttaccagacacgggtcacgctctcattcagagccaccttctagaatccttgataaacaacaacacacttctgtaaggataactctcgagtatttggctctgagagacaggtattcctggctctgggtttagtgggaaccctgggtaaaacattatccggcctttgtttgaggtcttttattgaagctaatgactgggcttgtgccttcctgagataaatgacattatctctgagtgggctgacaggaagcagacatgttaatggtgaatctgcaggggagtatctgcttgggttctgacaaaggagcggagaagggacccctggttgtggtcattagcacataatgcattcttgctcatcctaagaggcccttgataattggaaagctattttagctacaagcacttaaatcataaatttactacctaagagtagcaacgtaaagtgtttttgttaagaagtatctgttctgctctttgaaggtggtggcagatgaggctgttggtaatgacatttgggagaagtggcaggttgaagcatttgttttagaatcagatgggcaccctctttttctgtcaacattgctcagccttccttctgcattcaccaggccaaaaagaaaaaagaaagaaagaaagaaagaaagaaaagtggatccaaagctccagggaagtcagttttgtatttgaagatgtctcgtgggagggggataaaaatctccttttttataagctgggaaagagattttgctcagtgatttgagtgtggtgaaacctgccttttgaagtgtaggttttaaaaagtcatgggtataattgagtttcaatgcaatttaaacgctgctgcttgaacgaagataattgccacgttgaacacactctagaggtggaaggatcacactctcccattctttactattaagcattgggaagtttgtcatagtaattactgtaacacaacatagttttgattgccagtgctctcagcttgccagcgatctgaacatcaagggtgtagcttggatcctaaacagtttatttctaagtcacctggagagcgttcttctgttatgtagaagccagaactaaggaaacattgggctacccttggctgcaacttcacagtggaatatcatttctttgctaggattgttaccagcgattatacaatgattatacatgtctgattctgggccattgaatatggtagggatagggaacaggtgaaatgtaatgcctttggtagtcagagactaagtaatgtaaagatcatattagaacctggtaaggggtcttttataaaggtctgagagtttaaatgatgtaattgcatgtatagatgttggattggtagtcttgtgtggtgtgagctctattcttaaaacacaaaacaaacaagtaagaacaacaagccaaggttttgagctggcccaaagggtgtaggcactggacaacaaacctaaggacccaagtgtgttccttagatcccacactcaagaaagagagaaccaactcttgtcatttgttctctctgaccctctttatgtgccctatggcaggggcacacacccatgcccaagggcagatgcacctataaataagtaaatgtactttaaaaataaaaaaaagaaccactaattttgcatttcactctgctagagaggggggggcatccctccctctgggtcaaattttgtctcccctctgaaatttcactagtgactgcttactttctgtaacaacttctcaattcaagctaaaggatttggcaactgtaacaaagccattgcaacaggatgaaaggttgtttaaactcctcttagctgtctgaccagcagttgggctgtttgtaatgttatttttgagagcttcaggggaattcaagatgatgaggctggcactttgttctggaagctgaatgttacaggcctgctgaattttgcttagaaacacctttgggaatgcagtagaagagattatggattctgcttcaaggactaaagtgaccacaaagcaaatgcttgagtcttggtagggccagtgggccttgaactataggaatgtatgtcatcagatgtttaaggagtcctttacccccagggacgtgaagtgaaactttaacatcaatgctctagctctgatggagaactcaatgggtagggtgttctgattaggacaagcaggcttgaaatggtgaacagacatctctgctgacattttcaaagcctctccccnnnnnnnnnnnnnnnnnnnntccccctccccctccccctccctctttctctccctctctttctctctctctctctctctctctctctcctcccatctggtcatttggacccagtctgattattattcatcataactctcagccatctcactttcttcatcctgggactcttcagtgtctgctagaactctaagaaaaatgtacatttaggtatatcccaataatgccttatgaatgtaggcaacacagtttaggggtaaataaaaacatattgattatatttttgtgtcgttcctaatggccttagaaagcacatatttagggttgagaatgggcttattatgttaaccagggagcagatgtcatggtgccacagacgtataattttacttaaagggacttttaaggtttttgatgtgttttcttttcctcttatttccccgatggcttctttttattgaagggtaacttaaggagacctggtagcaattttactgccttcccttgacagtttgaaataatagcttggtctttgcttgtgctgatctcataccagtgagcttgattctggtttttgtcatgtggcagcaaatttatttatttatttatttatttatttatttatttatttatttatttaaaaagtgtaatatgttttaaggaatggactcttttatatgcttcaattagcagcagacgacaaagttccagttggtcacactttcgtaaactcttggaagtcgttgcttgcccctttgattaaagaaaacttgtggtttggttgcaaagcgcatctggccttctggaagcttgcttttccttgcacccctgtgtccttcacattagtcactgagggttcaaaggtcgtgtccaagtttttccgtgttaggttagcagcctatgttggagggctgccctttagttaggtaccggccttaccgcacctctgaattccgctagcataaaaatcactgtttgtgcagattttatagtttagctaattcttcactggaaataggagggggatttggaaaacattcctctctcaccctctccatccccctttccaaacagtgctcaaccagaccggcttacttttgaatttcctgtcatctctttcactgattttatggatagctcatattaaaaacaataatgtttgacttggaaggcctgaaaccttgggtttttcattcttcatggggaactgtgtatttgcatgtggctcaccacagtacatggataacgccatcaaatctggtctttccgtttgggctcatggtcagcacaatagcacttagctctctgttccctggttccagtgcttttgtgatggaaatgaaattaggaccagagtctaggaagcaaaggagaaaatacgcaacagcaaatagaacctgacccttgacctacttcaaaagcaagcagtggtgatttaaaaaggaagaagaagaagaagaaaatcccagggagtgaaagagagggtagtccattttaattcggtgtgaagctgtgtggaaggtgcgcagagcgcagatgaatggtggccacccggtcaaccagacaaactgaaggcttggtagctgatgaagaagctctgagcattcccggatctgtcaactgctggaaggtacaatatgaactaactctctcttgcgtgctggctggggctgcccaaagggagcaacaggatttcacaaaggagcaattggtctccctccacccctagctcaatgcatccagctccgtttggacaattgtctccatttacattcctcgcccaaatcctttccccagccttttccgtcatggcgaagcagatgccagacactgaagtcgaaagccagcagctgtttccattacttcatggctctatgggcccttactagcctgctgcttccccttttcctcccctcccccacctggtaaagaaaggccctctcccttggactgggccccgacctgtgtgttagtgtgcaggtccctttattttttgtgtgtgatgggaaccagagaccagcctgcttcggtgggggcgtggcctgggctccttggggcgcgctgcttgctcctggactcactcaccctccttgcagccagggacccgtttatggccctgagcacagtaaatctgtcagctcttcaggacgccttcacctctttcttcatttgctccagcttctagtctgacaacgttcccctgaggcggaattctaatctgcttccaattagttgtaaaatgtgactgaaatttccacattatgactgctgttttacttacacgcacacatctagaaacaaattaatgccttcaatatttatttatttatttcttgagcctttagatttactcgaagaggaagagttaccgactattaggaataacttccatgggttccatcttctccactctcctatgagggatatattaaaacaagaggactccttccgctaggagtcccctcccagccaccgttcaagattcagaacgtactgcaaatgttttacaaaaaaaaaaaaaaaaaaagtagaatttctaaaataagttaagtaggggcccctgtagagtgttttaatagctacacatacaaatttacttctaagtatagcacagctacatttatttggcccagacacattgttacctttcaaaaattatttcgttatatggccaaaagctgtagccccagatagaggaatcaggtcgctctggcttgaaaaatagggttctgttaatgatgtcattgtaggcactaacaaataccctaagttgtgtctaagtccctggagcaaaacttcttggagctcttgggtcccccatccatggagtcccatggtttaagcccccagcgcccatgaaaaaatgggtggctctcaggtggggggcatctttacacatcagtactcatgacccttctcttcagtgaattttctcgaagttgttgatccacccgatatttgggaacattagaagggtttaaatcttggcctggaaagagacattaagaacactattttgtcacatcccctggaaactactttctcaaacagccgtgcggggatgacgtgagtacacatagcagtggacccgcagcttagcattggtgtagaggtggtgctctcggtgttaaaggatgtaaagccagaatttattggcactgtttatagtagagttccgtcctccagcatcttggcagattgatacaaacaggcgtaatgggcttgaaagaggtgtgaaggattttactgatggcaaagagcttatgttgatcacgtcactctgttggtttctaagtaacagctttccctgtaaatggaggtatctattgtcttttcaaggtctttgtcatataatagtgaaagacccatgttgattgattcttttttaaccctcctttttatgtgctattttcaatctctggaatcaagagaagtgtttatttcacttcacttaaacagatcttattttacattatttattatatatggaatataaattacttagatgatttttaccaaaactcttcatgtttattatctatgagacagaaatggctcaaatagtttttacaaaagccctttatttaaactaggtacaaaccccatagaagcagcaggcaagtcttttatatggcttcctttcttcttctttaatgtttggtagcaaaaataaaatgggcagattgaaatccctgaaattttaaggcatagggcctcttagtttgcggagccccgccccccagcttaaaaaacatggccatcttcatactaaaaacctcacaataggcacgactgtggtagcccctccagtcctggggttcactaattaccccttaatgaggtcagtgtgccccagtagctccctatcttgggaagaaaagcacacaggatagttggatttcaagtggatcttgctgtatttgcaacttagcataactgctttgaaggcccccagggtacttaattggggcctggcatttgggtttggggggtgggggtggggctgctgcacacagctattctttgtgtgtctggaagccactgtgcaccttggaagcattacaggcttttgttgctggtgcatagttttataaactctgaatgagcctcttacctttttaaaaccatcgggagagcaaaatagtgggtgaacatagaagtctttgagttggtcagcagccaagctgttaacaactgcagcagcagcagcagcaacaacaacaacaacaacaacaacaacaacaacaacattcagagacgaatgaatggttgaatattagaacaaaccatttgttgccaaactaagacttactcctcactcaaacctctgggctggtaggtgacactatgaggctgtatagtacagaaaccgaatgcccagggttgtgttttgtgatcgcgctcaactgtttcccccttgtcctttctttgcatgcaaaacaggtgaaagggagaaatgatgtagttatttaatggtgaggctgcttagccaagagcatttcttattaagaaatgagctaagaggtgtggatgcagcttcctcgcctggtcaaggcagtaaaactctaagatggctggaagaaaaggcttgaggactctcaaccaacttagttggttgagatggtggtggggagggtcaagcgagtcggtaagctcaggaggggagcagaagccaaaaggctgggtagtggagggcccttggtgccccatggtcttacccaacacattctccagaattgttggggcatttgtcagaaacatcccctgtttaattgggtagtggcatggttctgaatagaaagggactctccaggaaggcagtgatgtggtctacaatcaaggggccaaagagctgttgtctggcagcctaaaatcggtgtgattctctttagaaaaggacaggttatttatttatttttttgacagtaaattaccagaaacaatagcttttgttcccataggagttgtagctcagccttctaatctcatggataaagaagcttaggggtgtctccagtaaactactgttttctggaagtgtcaggctaaacccttattcattacttttatttttacatcaatcttgtgagtgagaactcctcttttgtctacaagctaccacacttcctgacagatccaattttttttttttttaacactgcctctgatctttttgatcatggtcaaagctatcccactggaacatgaaaaccatttgttccttacgcgatgcattcctcactattttatgtgtatgagcgtttgggctggatttgtagcgtgtgcaccacgcgcaggagaccggaagaggcctttggatgacctgaagttggagtgagggatggttgatgctggcagctgaacctgggtcctcctggatgacagctgggtgctgttaaccaccgagccacctctccagccccacatgaggcagtcttgaaaaaatggagcttaacaattatctagcctgcttaaccttgattgttttcttcctcaagttttggtactgctgttttaatagttggataactccgacgtggtatgacttcctattcaaatggaatcgggtaggtttattggtagctctcttctgtggacttgcacaaaacagggaaagcggagttgaggaacaaataggatataagagatcaggtcttaatggcttcactgccaaacttcttgtggctttttaaactgtgctattatttacatctgatgcttttctagtgatgtagtctctataagtgaaggaagagaacgggtttatgtctgtgagaattcaacataactcttaaccatagacttagatcttcactcttaccgctagaagtaccattcattgtctctaagaccactaagtgagaatgtttctaaatgtaaagaattactcattgtggtgccttctagttttcatcccagcacttgaaagatggaagcaagtagatctatgagttctcggccagccaggcgtacatgtgagaacctgtccctctgacctcccccacccccaaaaaaaacccacctcacttatatttgatttttcagtgagcattctttcttcaaatattaatgtgtgctcagtctaggtttacttaacaaaccaaaatgtaagtgtgaaaaaaaaaatcctagcacctgtgtgaaagcccagaagtcctgaagcatgaatgtccctatggctttaacctttcctgaaagacagcttttcttgccacttgtccttggctccgtgatgtaaatccttgctaggcttttaagacgtcaccacctaatcatgccctctactcaggtgttcagtttgacacaggtaggataaagaattggggagggcaggcgccgagttttctgcccctatgacttaatatgaattcctcttgggtcttgctggtcccgttgagcctgcatgatatgctatttagatggctcctttttgttactggtataaccatgtgtgggggagggaactgacctaagatgctctgaaaatgatttttataaatctgcttaccccaagtctaatgctttctattgtagcttatattaaaggcttaaggatcactttgaaagatgaccacgtgaatccacaagcctcctgcaatatcatgtacatgatttcctggtaccaactaatcttctctaggtaccggagcttgtgcagctgcagttacttccataggctaatcctgcccagttttaaagggacaggagttcttactagctgcagttatgtcccagtgatcagctagcacaagatcacttgctttgctagagttcagctgtctacatgttaaatcgtaaacaccttggagtttctgacaattgtgaacactgaagaagctggaagactttatacttgaacttcctttttagcccacatctttactagaacactggatgcacataattcttctacttattaaaatgatgtgtatgtagggtggcctgtgtgtgctgtgtgtgtgtgggcgtgtgtgtgcgcgtgtgtgttcgtgtgtgtgcgtgcgtgtgtgttcgtgtgtgtgtgtgtgcatgcgtgtgtgcgtgtgtgttcgtgtgtgtgtgcgtgcgtgtgtgtgtgttcatgtgtgtgtgttcgtgtgtgtgtgtgtgtgtgggtgcgtgtgtgtgcgtgcgtgtgtgcgtgcgtgcgtgcgtgcgtgcgtgcgtgcgtgcgtgcgtgcgtgcgtgcgtgcgtgcgtgcgtgcgtgtgtgtgtgtgtgtgtgtgtttggctgaggaggccagagatgttggatctcctcccctggaactggagacccaggcagttgagagcagcctggcatgggtactgggagtcaaactttcaacctctggctgaacagaatgggtttttaactgctgagctttttctccaagtcctcaaattgcgtttttaatctggtgagtgagtggcttgccaccatataccagtagaggaaggagttaaatggcggtgaaaaaaataggtaatgatttatctttcatctgccataaattctaaaagctttctggagtctccctcattttgggcccattgtcatttgttttaggatctaaagaatgaaactaactggataaataattctgtgcaatggagtagagtcgtcttcatgttatttgagcctgaatgtgcgtgcataattggagagattattggagagagagagtgttttgctgtggtagatgtggtttcaatcctagcgttgagcatagcatttagtttctcagcttacccacaaaatctgtgactaatttagtgaatgtgaagatttttgtccagatggttaggtttaattgtaaaaactggaaagatttcaaagtaccctttgggggagtgtgggaaatgagtaaacagcaagaaagaattaaaagtaacgataaatcaccaaatatagaatatatgtatattttatatttataaacacacactcatatatacttaaacatacacatatatttatatacaggcagggaaaagcttaaagaattgattatagcagcacgaaggtagaggatctagaaagatgagtgtgttctgcgtggttagctttccctgagctcagaacaagcttggtcacaaaggcggtggagttcaacttcctcggcactggctggacatggttaaggtcattagttattaactcactagatgctgaagtgggttgtgctctctcccctgagacttggcttagaagcccaggcctgcgtgttccgttcacaatgcagctgtgtaacccagagaggtaggaagtttgatttttagcacccatttcttcttctcaattccttcctgtgatagccatgccagaaggtgtaaaacaattgtaaggatgctctcccaactatttaagagctccttctctctatccctatcccttcttatggggccggggactgaaaacacagacgttgcctcttttgtgctttgcagtcaggatactgatgacctaaaccttgacctcataaattatctttctctttcccagaaaattttctttgaagttggtagcctaatagattctatactgaactctttttgtgtgtgtgtgtgtgtgtgtgtgtgtgtgtgtgttacctagatttatagggagagaaagaagtgacgtgccaatgacttcaggaaatatctagacaaaaggggaggccacaaggctattgacaatatctgctgtgtaaagtgggcattggctgtggaaaatggtccctaaggaagcaacagaaatgtatccagacatcagagagtgtcgaggagtgagctctgtgagctaaatcgatgtgctacatttaccatataccaattgctttcataagagactggggctgctttgcatgaatggaaggtttgagagaaaaagaaaacaccaccaccaaaaacaaacaaacaaaccagaggcctgccatattgggacggtgtttttcaggttctgaaaagacatgtctaagaggagtcaaaccatgagaagacaatccacagaatcatctaagcatggctcataaggtctcccagaaatggaagcaacaaacaggctctatgggtctgagctaggtcctctccatataccttatggttgcgtagcttggtgtttttgtgggactcccaacagttggagtgggggctgtctctgactcttttgcctgttcttgggacccttttcctcctactgggctgccttgcccagccttgagattacaatttgtgcctagtcttactgtatcttgttatgtcatgttgggtgaatatcctgggagacctactttgtttgtttgtttagggaaacagaggaagtgttggtggggtggttagctcggaggagtggagggagtggtagtcactaggaatacaacgtttaagaacgaaaaaagagaagtttggagagagagctttctgtgtgggagtaagtttaagtctcctaggctgctacaccaatggcattggagagcaaggttaactgaaggttctctatcctgtaacaaggaagtgctctttgccttgctcctcttggctaaattcctgcaaaaaaaaaaaaaaaaagatatctttttccatcttctgacagattcttatctggctatagtctggtttttctcccactgtttatcaagagctttgacctctgttagcaatccattggatggcttttactgacgatcctgatagtgctctgcagtcccaggtgaatggacagataaagggcagagataagaggctcaaaggtacagactgtctggtaggggaagaggcaggagagtgtggttgctgtcttcagtagcacgcctgaatgagtcatattttctgcctacgtgtcaggctgatttcaccatcagcttgctctatgctctagtcattttcttcctcctgtttctttctttcttcctctttccctcccgtcactcttctccctaacctaaggcctcattcatactaggaaatgctctatcactgagctatttcctccatcctttctgtagagatttcttttgctatggtaatacacataatgtgattctgatttttctaaccttcttaaaacttaatatagagcccatgattcaaatagagaactggtaaggacaggaggtcctagagacggatgctgccattcaagtgcactgtaatacaacttgagagcaagagtcatgctgtttttttctgtaggtttttttatttgttatgaatttcatatattagtccagttatgttgtggtttccagaaattattgcagatttctcatgaacctggtaagtcaattacaggcatcgaaataagaatagtgcacatcattgaaaagatgagggtagctttacacaggtcaggcaacaggaattccaaagatacaatgggttttaagaacacagaatctgtgtaagtagtaagtaatacattttatttcttcccaagcatcgatttggcaaaagggagttttgggtgacagagcccatgattgtgtttttttctgttggaaacctgggctatcttaagacccaatggaaaagaaggtcactggaaaattgtagactacttttgtcgctgcttctttcaggctttcaatgacaggaagttcctataatggaagaggttgggtctcagagactgagagagctgtggtttgaagctgtattatagggtacagagccttgtcaagtgtgctgtttgagatggaagacaaagagcgcttgcagaggaaggagctgcgacagcagctccagcaagtgatgttgtgtaagagggggcttgagtttggaatctggattgattggcttggacacaaccacaattttctggattgtacttcctcaccgttttcttggctgactgcacatgctgttaaatcccctcagataacacacaaggcatgtattttgcacagtctgcatccagattggattgggacctggtcctaggccccatcatgcagggccttgtaggctatggtgaaggagtttatattctagttggagtgaaacaaatagcatgacttagttagatttaaaaaaaaaatcttcctctgacatgtgttgggtggagagagccaattgccagaggtgcagtgaaattgattatggatttttccagaaggtcccataagacacagtagatgtcttcattagtcctagagttaggttgaaagtggtcatgttgtccaaaggtaaagacagactaggacttgatctggagttgggaaatagtaagagttaaggacagcagctgaacgggatgggggtggggtggggtctgagggatcagtagttatgagtcacttttgtttgtttgtttgtttctgttttttgaaacagagtcttccatattcctgactggcttcagtaaatagtcaaggatgaccttgagtctctgcttttgccttctgagcgctagcattgcaggcgtgtaccagcacagccagctaggatacacctttgacacagcctgaggcaatctgacatttgtgatggttagggtccggacaccgacaaggatgaagttgatttggaggttggtgggctgagagaggtcacccaaagagtgagtgcccttagaaaagacaagagagcagagatgagccctggagttttaagaggagcctggggcacgcgtgctttggaagaggaaaccccaggcaatctggtgttttctggaaagcaagttttgaaattccatccaggtggcttggatcatctgtgccaaatgctgccaagaactcaggttacgatgagactcagaatcgatgactgctaaactcagcaatcatagtccttactgaaacacaggggcagggaaacaagatatcactgaaagacttaggttattgaaggagggggatcaggatatatccaaaaaaaggttagcgtaaggactgaaatgttaatctaagtatttattatttaccaaggagtgattatagctgtgggtggagctcagttgatagagtatttgtctagcatgcacaaagccctgagatgaatctacagtggcttctttagctgtaaagcaagttcaaggacagcctaggatacataagaccctatctcaaaaggggaccagaaagtaaatatctatcactttcaaagtgtaaggaacttttaatagcctgtttatgcactgctgtggaatggaggcaggcaattatactagagcggaggcaataaatgttctttattaggcatgagggtcagggaaggggagatttggtttggcgggggtgggggggtgggagtgctgctttggagcttggcagttgaatgagtcttctattgtagcatggaaagatgaggcttagcaacatatactgagttgatagaattagtggctaaaaacaaaacaacccctctggattaaaataacagcaacatctagcaaatttttgctggcgattacacaggccttgcacatgcaaagcatgctgggtaaaatacgcccctagccaggaagattttattttaccatctgtgcagcattgttatggtgttaagggacttagaaatttctttaatagagatgttttagacaacaattgtgtatctgcccccccccccattggtttagggatctttgactactctgactggtttttcaggagtagaaatagtagaaaagcaaggtgcatatacgtgactctgtttatttctctatttgtacctttatccatctcttcattgaacaagtcttttctgagtgcctgggtctgggtctccaaggcacagtagtgagcaagccaagtcttcatcctgtgaagcatttattatattctgagttcttatggagaagccaccgtattgtgcgttgtgagggggaacgtagcaggggaggatggaagagagctggttgaagggagagtttatatgtgtttgttctggagtaggacgtgaatacagactgccaaggaccatttgacccatggaggcaatcaatactagacccagagtgcagtccctgaggtgggaagtgtttgcaaacctgaggagatgaaagtgtccaatgtgtcatgagtgagagatggagatgacaaggaggccgtgtgatctcagtggtattagctaaacttctgaggccaccccagatctttgggtttttcatttctctgtggtcccgggagatggaggtatcatcttgtgtgaaatatgtctatcagtcccacaggaatgctgcgaatcccaaaggctattggtagaaccttcctcagaagacattaatgaaagaatcactttccaggtggagtgttttctcagttctgagtattcacacttgcacacaggcacaactgtgcacgcacacactcatgcgcacacctcatgtactgccaagttataaataacgttgattattccatcttcgaaaaacaaagttaaaaagccatgggctaatgattcaaagaccaatcccatttgttttacaccctctaccttctcagtcccttggcatctgacaaatctacatgttgggtgtttgtggagaaggttgttaatcccagcacacagaaggctgaggcaggactgcaagtcagaggacagcctggacaacacagagaggtcttgtcacaaacaaacacacttaaaacaaaagactatgtctcctactttgagacctgcctcattaagctcaattagttgtgcttagtaaattactgctttgctatgttgtgttggatacagaatcttctacgtagcccaggctggcctcaaactggagatcctcctgcctcagacttaaagtaattcttaagtgactttaaaaaataaaaattaaatcactacatgagtttatagaaattgaagttgtaaatatgtagcccatgatggaaaccaagcgttcctgtccctaatgcttggcccctcccaggcccctcccactaagttccatccatagctttcttgaagtggtccttctctgtcagtcacgtgaatttgcaattcgcatctcctgtacaatgagagcatgctagagacgcggatctgagcatttctgttctcgagtagctatgttttggaaaaatcacttgctgtccttggattccacgagttagctgggctggcagcacgggggctgttggcaacctttctcagttataagaaatgtcctacggaacatctgaaaatttaattccgcccccagtcccctccccagccgacaggatggtgtggatcacccaacactagagcattcagtgtgcacttctctacaactcaccgtcaccgtcgggtatgattttctggcttcaatcagatagggacttgtggtttcaatttgtatttttcacgagtatgctttgaaaacttgtaatctttgcctggttttatggtgaaccagccactttttgaccttaaatatttcaggtgcaggttaactaatcacactcactttctacgttttgcaaatttcttgcttgccgccttatgtttgcacccccccccccccccgaggtctaactacatggtggatggtttgcaaatattttttttcccatctcttatctctggatggtgtttattcatgtcccctccctatccccaactaccagtcctgtgtaaaaatcttaaactgtgtattgaagttctataattaattttccttcatagatgttgagctttgcaccggcttagggagaccttccatatcctaagatttattgttttctactacttactaagtgctgtgatcatcttctaagttgtttttgtttttactgagatatggtctcacaatgtagccttggctagactggaactccctatgtagatcaggctggcctaccactctcagcaatccatctctttctgcctcatgagtgctggaattaagaacatacttcactgtacccggcttaaacgttattgcttgatcagatctgtatttttcaattacccaaggaatgctctgtctcctgccccactcccatttcccagggcccctgccctgttcttttgtgcacttttgagtacagaatcagatgacacatctgaagattcatattccactccactctatctcaagaatggttatttgtatctactcataaaatagctcctttttttaaaaagtcatcatagtaccattaaataccagttcataaaggtgttttgcagttaatttgtgggcatggccaaatgggagatgcagccaaaaatacagacagtctagactcagggagatgtatggccaggacacacttagtcctgcttcctcaaatcctagggcaggagcttcgaagcacagattaacttcttaagtagtgaagatgagccaggctgctcttggttgaccgcttaggcttagtattacggacactggcagggcaaaggaagtgtttagggggtgtccaaacaatgggtttcatcaatttcttccacaatcttacccgtgcagcaacaccatctctggtggtcagctgggttttcatctcttttaggataatgggcaaaagccactgtttggggtgatcttgtcttttatttttatatgctttctttctgggactgaattttctgaatgtccttctatttcccaaagagctgtaaccctcctatccccatctctactttctgcactttaggcaactgtctcttctctgcaccttctccatgtttttctgtgatctgtgcctgcacatttctcctgtgcgctgggggacccctgaggacatttttacttatttttatgtctgtcagtacttgttgagctgtgtcctcttttcctggtgtcacagggtagaggagaggcttcagcacggctcccctggatccagacctttttatttctccctctcttctgagaacagagacaaagacacttggaaatgagctaagttttcaatctgtcttgcactcacagacacttgtgataatataaaagttccgttatgtgtgtagttggttggattgcctatgcctcctaagtctggtagggtctgtctgttaggttaaagaacatcaatgaagtgactaactcaaaaggtttatattgcttccgcataacagactgtggtgatgtcctctgtggtgcgagaatttttttttgtctgatagtttctttgttaaccacaaaaccgccagggcaaaatggacaactattcttccaaaaatggggggaaaaccccttcaatagttgaatgaaaaagagagatgcctatgggaaagtttgtaccagcaaacctgatttgcaaaagaaataaaatagacttgggaagatgtttggggggggagggtgtaaaaagtttgatgtgtttatgtgagggcctgcagatcattggcacacgttaaaaactcagttggaaaaacattcccccataattctggcctgggatggtatagacagaattctctggggattgctggccagcccatctagcagaagtggagggctctgggtttagtgacaaaggttatctcaaaaaataaggtgaaaaataatcaaggaagacatccaacgtcagtttcacatgtggacaccagagcacatatatgtgcacccaaacgtgtgcatatctgcacatgcataaaaagggtcagcctatgtgtttggagtgtgatgagctcttaggaactcaagcatggaatttgccctttctctctatgctaaaattcatgaaagaacttgaaacatgacggtgtctgagggtttctgtatgccatcattgtttgtactcatctgtaatcaatcattgcccataactggtgtggaagaggacagtggttttggcagatctttgtggtgcacagcattcaggaggcagaggcagagaggcagagaggcagagaggcagagaggcagagaggcagagaggcagagaggcagagaggcagagaggcagagaggcagagaggcagagaggcagagaggcagaggcaacctgcctgaaaaaaagagttgaacagtgatttcttttttcttttctttttacctttggcataagtaaaagtcatcaattattttttgattttgatacactaatctttaatcttgttgcctgaggaatgtttcttgatttcagtagcatcttcagttatgtttaaggactttcaaagtcctattggttttaagataaccttcaaagatgttattattatatacctggtttgctgacaaagaaactcaggttttgtatgaatgtcagaaccctggtctagaaagagatcctttaaaaaaaatttttttaagtcttgttttctttctgtagtcctggttgtcactatgtagaccaggctggcctcatatttacagagatcgaccagcctctgcttcctgaatgctaggattaaaggtgggggacattgtgtctgcctggaagcaattagagtgtgcactgtaaggagaaagtggcgcaatgcttgcctgaattccctcccggctgatcagctgcctgtaggttaaccagttaggattttaactgagcctctatggttcctgtctccagggttgaggagaaaggaaatagagacaagaatactgactggaggagcttccgtgaaggcgggccttcttcggctccaagtgtttgaatcagaatgcaggctctttgatttaaaattacttgtcaacaagcccttgaattaagtgacttactgggaaccaagcagcccagactaggaagatggaacaggaaccccctgcttcgtttccttctcctaatgtttccccccattgccccatgctgatttccaaatgaagaacaacaaatgaaataacaggcgaacactttgtaaatatagagtgttttacaaatccaagcacaaacaaagctgtaagtggtagggaaacccaggccacgcattttgtgatggcttctgttcatacattagggagcctgatgggacccccactaaacaattagttaccagctgtttgctttaatctgatcatttacaaaaatacagcagttcttactggtagtaaatatgatagacataaaatgaaagccatgcgggtgattgacattttttttttaacgctgtctatatgggtggtggaaactggttttaactctaattccagaaatatcaataagtttatatctgtcttcccgaaagatttggagagaagacactgaaggcttagagagcacacattgtgatttctttgacaatggaaagcaccgtgctaatttggagaaactcattaatgtgtaggttaatactagtagtgcctcttaattaagtttcagtggatagaaggagtattaggaacagaatacataggagatttttatagaatctctgattgaggcaagccaccggttatttctactgtgcatgctaatttaaaaataattcaataacgattcaatttgtgtcatcctggcatttacaaggggacatgaagaagtcttgcttgtcattattcaccaaatagcagtttgtagacccttacaagttcccatatgttagtgaaaaacattttccaagaaattggcaggatcgcactttgtagcccatgccagcttcttcctggggccaattcaacagagaagagagagaaggcaaaaggaaagaaagaaaaaaaaaaggccttccttgtgttagtggctgaattactctgacaggctttcaccttgcccctcctcttattaatattctttttgatgtgagcttgtaaaacagaggattggctgttaatctccaagatctcaagggcttttggcagtggcccataattgatgtgttcacatggctgttgtctgactactaatgatcagacagcagcgttatctaccagctaaatctgtgttgcttataaatcacacttgataaactgaagtttcatttcttcaaagagtccgtacagaatgccaggggcatttcatgattctctgacagcttagattaggtttatttttcatttctgtttgacaaaatattagactccctaacgcaagggaaagggaatttgttttgtttctctaacgaggcagttggagggtggggtgataagcagagaaggatggcctgttttctacccagaggatgtacagatcggggtggcagatggaattttcgctattgttgccatccttcaaggtgagtggagtttgatccatggcatagtgaaagacaaagggcagaggaaagttctaagaatgtggatctgggttcagattgtgacacggccagggcagggtaaccagaactgtgagattacagtagccattcagtcacagtgtgtgttgagcctgtgtgtcaggtatgacttcctcctatggaaggccaagaggaagaagacagaaggttttacaaaataaggtaacagccacagaacttctgggttctgtcctttaccactcgctggggatacttatgcccgtagacgtacccagttccccctccaatatggagatttgaaaccaggataggatatatataggatgcacgtttacagtgcgatatgactgggaacttctgctaagtcatggttgttcatttggccacagactcctgtggctctgagctaacttctgccatgtataaaagggaaaaacaaaaggactgaatttcatagcccattttgttgcttttctgtaaatattcatgtcctctgactgttcttacaaagcattttgctaaagcactagtttgtgtgtgtgtattatacatatgcatatatatatcatatattgtacatatatatgatatcgaatatatacaatataatatacatgatacaaggtctctatatgtagtccctgctttcctagaactctctatgtagaccagactggccttgaactcaccaagatctttctgcctctgcttcccatctgcaacaccatgcctgtggtttgtgcccataaatcctgaagaccacatattttcaggtttcaaaaaaaaagatggtcaaatcaaaattgtgatatttaagaacaaattttgttttgttgtgtctttgaggtagggtttcattctgtagtccagtgggcctgaaactattggtgattcttctgcctcagattcttggtttctgggatgacaaacatgaggctctatgcctggtttggaacctaggctggcctggaatttaattctcctgcctctgccttcagcagtgttgggatgaatggagtgtgttagttattatgcctggatgaaacaaattagaaacatagtattttaaagagaaacttaaacaaatttgaggtgtgttagaagttaatttctttaccaaaatggatagctttctgggcagtgaggtggttcgtttaaatagaggcatttgctctcaagcctgaggggctaagtttgatccccaagacctgcatgtaaaaggagagaactctcacaccttgtcaaagctactaaagtgagtcccaccagtccatccctccccacccagtgcaacctaacccaaccaagcacagcttaagatcaaaagaggccaaagccaggaaggtctccaagtattgcccttttggtactttttttttttttttttttaagatttagtaggaattgtgtgtgtgtgtgtgtgtgtgtgtgtgtgtgtgtgtgtgtgtgtgtgtgtgtatgtatgtgtgcactcctgtgtgagcatgggtactgaaggaggctgttggagtccccaaagctgggacaacagttagttatgagccatggattctgggaattgaactcaaattccctccaagtacaggctcttaattgctgagccatctctggagcccagtttttatgttttaatcctaggtgccaaatgtattccttatctggcaggagtggcttgacatgaggattcccttttcctagaaatagttttaatgctgtaattaaaattagcactcccatcaaggagtgaatgtttattgataagcattagtgctgattaacaaagaaatttacttatttctgctgcttaccataccatggttgatggttccgagtaattccgttttttattaaacaaaaaacaatttcagtttaagttgtttgggttaaggttattagattttaatatactggaaaaatatccgcgattaacgttgagaagattgctcttcggctattcaaatcgaggcttccctgaattatgttataaaattagcaatgcagggattctaatagttgtaaaatatgggaagaagtgcatttagaggtgtggagtgcaatttgcattataaaaatgtgtgtgtatagaagggctggattatgatagtaaaaataaaatactgagactgtttgaagagtttttaaaatctcatctttaaataaaaaatccacctgtgagttttataaagtgtatagccattatggcaaaaataagcatgaattctttaatttttttaaaaaaagatagcagtttttcttgactgatttaaataatgactcaagtcagcttgatttaaatttagctgagtctactgctaaaactgcaggtgtttactgactaactggagaagtgggtatcattttaatgtagataagagaagctctggtggccaccacgtgctgggagtttggtaatagcgtgtggagtaagcccaggtcaccttcagaagagcacatcctatgaaatatatgattcacatgttaagaaatcttgggcacttggagcacccctctgaaagatacaaccacatgtttgtttggaagtcatctctgctgcttccatgtgactaagatttatagcagatagtatttattaggtatgaatgaggttggatgagggcccttgaattagcaaggccaagctcctccatggccactgtgtgtgtgtgtgtgtgtgtgtgtgtgtttgcatgtgtaaggtgaggtcaatttcaagtctccagtgttctcctttgtctgcctcataacagtgggtcttactggcacacgctcagctttttacctcggtacaagagacatgaactcaggtccttacgtttgtactcactggttgatctgtcttcccagccccctgggatagtctaaaattctctttttgtttttgtttttttttttttttttggttgtgtttcattttatccttttaagatttacttttgcttatgtatgtatgcaagagtttttttaattttgttttgtttttttttgttgttgttgttgttggttttgagacagggtctcactgtatagctctggctggcctaaaacttatgtaaacaaaactggcttcaaactcacagaaatctgcccgactctgtttcctcactgctgagattttatatatatatatatatatatatatatatatatatatatatatatataatttatgccaccggcccagctctgtagaggtttatgtgcttcgagttcaagcaatatccaaatatcataggggccagagaagggtacatagaactgcaagcagttgtgtgctgcccctctgggtgctgggaactaaaacagagtcctttgcaagagcagtaagcactcataaccactgagcactcacaaccactgagcactcatgtctagcgccgagtctttggaacttcttctaatgatctagattatcttctgaaataaaaaaaatgtctaaaaatattctggaaatatgaatgtccagagaatgtgattctgttaacacctctgtctgggtgtctataaataaaaggcactcgcaagtgtgaaaggttaaatagagattgtaactctcgttttttaatttgcatttgtgattcataaaggtgcttttttttttctggaggttttactgtgacatagttgccacaggccttcagagtgccattttatagatgttgactatagaagacccgacccccaatcttcaaccctgggtttgtccaaaatacaggttttagaggaggaaaaacaaaatcactctttgtccaaatctcatcaaacaccggattctaagtgactgtaaatattgaatgttactttagccaccttagcctgtgacaaattaaacagaccgtgaacttcactgaactcggtgccttggggatcactgggcggaccaggagctggcagcttggaacagcttgactccccacaggttttgtgactcctcttgagatgaaggtcacattaccttttctcctggctgctggggaggctcaacaggttggggcctttaaggctttttccaaggtgagtcaggagtgagtaaggatgctgaatcagaggcctcagtctgctgagacagaagctcctggtcggtgagaggaccacacaccacgggtggtccagagctgtagactgaagtgatggaaaatgctaacatccctcatcttctggaaggtgagagacacagggagaccttcagccagctcctggtggtgttgaacttcccggacctcagaaaccaacttcctcttaaatctggtcttctttgattgaggctacctcctagtgactaggaccattactctgagcagtcttcctttcttcctctgctctatttgggtttcttggactccttcctccttccttccagccctcctgttttccccagagcatcgcacaccccctcccccactgccttcatcctgtgtgctgtgcattactccagtccagcccttgggtcctgtgcctacccaggaaacatttccctacagatatccctctgcctaggttctccttccaggggctgactctctctgtcctgattaaaaagaaagatacgtgagaactgtctttgaattcatcatctcccaccttctctaggcttggctgtgtctctcccttggagttcagccatggcctcttaaaacatatctttctcctctcctctctctctctctctctctctctctctctctctctctctctctctctcacgctctcctccccccccccccgtgtgtgtgtgtgtgtgtgtgtgtgtgtgtgtgtgtgtgtctgtctgtctccaactttgctctctctcatacattttcatttagagtccaacatgggctttaccgggtgagccagataatttttctatacccctacttcagaaagaagcccacactttttttttaaacccctaggttctcatccttgcctggactcttgactttcctattgtgcttcctggctccctagactgtcagtcccgtgactaaggtagcattcagaatggcttagctctgtcctagcccaagtcctacgcaggtttataaatccactacagtacactcactgccccacccccttgatgctcccacaatgccttgggcttaactgaccatctgaaccctgcccatattctcgactctgcagtgactattcatctctcctggaacaatgcttgccacatagaggcacctgacagaaagatactggataagaggatgacttccctaacagtgaggcagctttcattagcaactcttacgaaggggagggcatggggtcagtacatggtccttctgtcagaaaaaactagctctgttattcaatacatttcgtatcggaagctaaataataatctttcattaggagccttcgtcctcagctttggactgttagttcttttcttccttctcttctatttttctgaaacaggttctatggaactaaggatgatgaccttgaagtccagatattcctccccttcacctttcgactcctgggatgacagacatgtgcccctacacaccaaggtgtttgttttgatctgaggtgaaatggcttggcctcatttttattaaaagattttttaaaagaaacatcttgagtgtgttcgctcacacccagtcatcccagttattttgaagccgagagtctgaagctagcctgggctactcagcaagttccaggaaagtctaaggctgaagtgtgagacatcaacagcaaatgagagagaactttttaaaaaaaaatgacaccagggcttccagttgttattccacaaatattgaagacgatagtggaggcatctcctcctgccctgcatgttattctgtggataaacttgctcagaggatacttatcacgctttagaaaaaagttgttctcactagagagagacctattgggttttaaaaattggttctgttctcagaagggaaataagctttaacttggaaactgcaatttacttatggagttgtcttatgggtctgggggaggacttaacctaacaagtatgagttaaatgaccctgggtgagtctgatcctcaaatgcaaacatacatagagtatgtgatagtgaacttggtagagggcattacagatgttactgggaaaattcatgacttctgatttgtttattgttcttctttcccgactccgcactccctggcttctggcctgaacagacagcctctcttttggcctttagtttcgtcatttctcaaagtcaaatgagaagacttacagctgccttttagtcgaggtgtggtaggaatgaatgtgttgcaatgtgtcctttaaaaaagataggcatttgataccaagatagataaagtcaaaattgttaccgtctatggttggcccatgatgctttggtaaaatatgttttgaccctttgcaagacactgcctaagggcttgacgtgactcagactttcccttgttctttgtcactagcagcgtatattgtacagtgcaatatattttacaagactatctttgggtggttggaagaagtcacctaacctgagtagagaaaggattttagttaagaacagaaacaaaagactttcttgtcctttcttcattgtccttctgtcctccaagaaatagtgtccacatataacagagatgagacacggctatttatcccatttcaacctgacttcatgagaatttaggatccctggaactacagtgcctgagttcaattgagttgaaattgacccctaggctctcataggttccctatgctgagcagcatctgagttcacttctgggatgccttgtaaagtaatgggaatgagccttaattggtagaaatggaatttgggtagaacttttctcggaactcaactttataccaaggggataataaaaggattcttcccaaaaagaaggcgccctttctagtacctgctatgatctccaccaccttcctcagtggcttgtttttatattctaagtatctttggaaacagtatgcaaaaaaccaccattcactgctactatgcagagctcaccccactcacttttcagaatagattgtctgtggttcagctgtggggcagtagtctttgagagaacacaatcgaggctaggtatgtgacaactaactgataggatgcagtggaagagatctcgaggcctagatctgtaggaaatgacatattgagcatctttgaggggagattttgtttagcttccaaaacaaaaataaaaacagaacaaaacaaaacaaaacaaaaaaaactgagagcattgggctgagtagtgtaattacactgtcagcccacaccatacctttgatagtgcttggaaaagagccaaagcgagacaaggaagcttcaagacatgctgctgttcaagcatgctttctccgtgggcttgcacatagggacatgtctggggtgattcctgatggacagtgacaccctacccatccacccccataagcagcattatagagagcctagattgttgacattctgtgtgtccagcattctgtttgtcttggctggaaatggaagcaggcttcctggcccaggggtcagagccctggttgtgactagactctagcagcatctcagctatggtttcttccctctggatgctgggaactgagtggagggtttcatacaagctccaccacgtactctaccattgagttaatcctccactgctcaggtgtgcgcatgcgcatgcgcgtgtgaggtatgggcacctgcatgtattatgtgttctgtgtgcttctgcataccctctgagaggccatagaagatctgctctgtcgctttctgcattattccctccacacaagaactcttaccaaacctgagctaggataacatccataaagccccagctacctcctcctggctgtgtaaacacccacctcaacaccacaaggtttacaggcccgtgctaaccatgtccaacatttttttcatagagtttggaggtgcaaactcatgtactcctgtacaaagtcctctgcctctggggctaggggtaggagtttggagggatcacagtatttgtgtgcaaacttcaaactgtaggcatttaaagtaactcaggtgcctggcttcctgtgtacacaaaaggataagaaattccctatagaggaggcattctctccgtctcatgctctgttttacatttagagcaggttgctgcttttggctgaccttggccggttcaaattcccgcttggttgctcttcctaagagacccttcatctcttctcatctcctcttcacgactttgtgaagatcaaatgaaaaaaactcgagtgcacaatataatcctgcctatgatgtctgtttgaaaactattctaatccctttacgttatgtgcgttaaacagtagctcagaatgcgaactctttctacaaacaaatcgagagcaacaagcaggcaggacttttgagtttttagctctttggataacttgcccctcccctgcattggggatcttgcttctgcctctctaatgtggagacacagtgttagaggagaaccggtcccttcaatcattgacatgagtttacccctaccctctttatttttgcacagcaagtcccaaggcataaattgcattgatcttgtttctcagaagtgtccaccacatttaggagaggctaaagtaagaataatgagcaaagctggcgctgttctggtttgtccaccggagatggaaatttaaacgtgattaattttggattggggatcagtgtccaaggaacatgtttttaagccgactcggctttgctaatgcaacagtgacgtcaggcagctgtctaacacagatttgctgccacagtggcaagtggtcacctccaaaaagcctggatttctacttaagggcagagcagtcttctgcctaatgcgttttaaattaagaggtgactgtgggcaatctaataaaacagccaaataccaggatatgaagaaaatgtgagccttaagtacccatgccccagcatgcgcagagaatcaaaacattgactatgcaaactgaaacaccactcctcccgcctgtggcggttggcagtctgagaatcccaggattgaggggttaacggcaggatccgtgtggagatttgtgagaacagatgggaagaagctcgggcaccgtgccctgtcagggttcaaccccgatgcaggccaatcggagtgaggtggggtggggtggtctctgcagtgaggatgctcctctgtgggaagccctgggctcctttctcagccctcccggcaacactcactggctgtctcctactgcagagccacgtggatgcgtctttgttggtctagagtgcctgctgcagggcccctcagcccagcccgggagacccctctgtatttgctttgggtttcctggtagtgcagaccctccccggctgacacagtcaaatgtgcgatgatgaaaagcagccgccccccagcactccagcttttggagccttcctggctcatcaccactcaggaagcccttgaaataaggtgaacagagaaaatattgccaggacctgcagaggcgtcccccagcccccagcccccgcccccgnnnnnnnnnnnnnnnnnnnnaatagccaggctactgcacagcgtgcaccaacacctgggaataatcatgcaaaaataacagtgagagactgcggcgcgtctgttcttgacattaactttcctcagtttgacaggctgccaccaccagctgttagacttacgagtctttttttttttcccttccccgtcccctgccccctccacccccacccccgagatggctgctttactcttttgggctttaataggttacatcagtgtcccatcaagatgacagacacaagctttgacaaaggaacccctgctataactggccaatgcttttttccccctgatctttaattttcgctattactactgtataagccttccccctcccccgtgagttttaatgagcactatcttattagaagtatgtttctccccccaggaaggtatgcagagttgcctttcttgaattgccttttgtactaaagcttaacctttggcctctcaagaccaaaccactcatcaatttcccttcattcattcaagtctcagatatatttgccatggtggtaataattctgacggtagcactggctccgacttattgagtgttactctgtcctacggccctgaattaaggttgcttgtaagacaccctgtcacattatctaggggctatttgtgtttggtttttgtttgtttgtgaatcacatagagatgtagtagcttgcctgagcatccatatcgaataaccaagctaggattcccactctgaagaccacactgtctgcacctcactgctgatcacgaacgtcccacctcttacactcttcccttggacacagctctacaactgaagttgtcatttcaactcatttatgattaattaacgttgattgattctcttgatgaagcttgtcagccttgggggataggaccttgggttcactcttttttttctttcctttacctttttttttttccttttccttcttttttggttgttgcaggttgctcagagtttaggggtagtagctctttagtggatgtgagggttgaggagagcaggagtacattttttgggaagcccgtgtgcgaaaaggtgcaattggagattagaagacttcttggtaattcaggactcatcaggacctccgggatactcttgtcattgctaggagactataaattgagtgtggatatccagaggatggacagctaccaggtgccagtgtttgaaagagcccgtttcctcaggctgagcttctctggattaagcacccccttttcttatactttaacacattttaaccaaacttagctatgaatttagaggggattacagatttatgttaaatatagtagcatataaaaaacagctttgtaaggttgtgtatagggtttagagagttggaatttgtcagactgggagaatctgccacgctctaagagagtgtttacagagatgtacccagtcttactgcaaccctgtgcagtgctgagcattacttacaaccttcatttgaactgtaccctgtgctgagcatcgattttgcatgagtttcccttgcaacccagtgggtgtgatggatattaacaggcccatttcttagactctggtcctgatgttagctgtcattgacttaggttcccatctagcatgcactgatagagccaggacttgaacccaggcctcctgttcacaaaaccctagtttcaccccttcagcggccctgctcagaagctgctgctgccccacagcagacaggcctatggaatggtttgcagtcctctgccttaggaagcttcattggctgaagaaattatgccttcagtgtaggtcagtgacctgagaaattgctcaagaggagttggtctttttgtataactatcgaggcagggtgtgggtcttgtaattccagaatgaggggagctggagaatgcacagattggagccagaacattctgtttaaggtaaccctgtctcaacaaatactaaattagctgtcatgtatcacttaaggtcctgcttatgaacatggtatgtgtgctctgtgtgtaacaccacgacatacatgagagaactgaaatcttctcagaggaacatttcccccgggcattacctggtagaaattactgaccatattctctgaatgttccgctctgttttagtctcctggggtaggtgattctcttgtgaatttcctactgccatgtggtcttctcggctgtcctggatgacatctgggctagcttattgctcttgctcaaaagtgggacacaagtttccttaggattgagtgcattgatctcaggagccttctttctggagcattctgtggtggcctcaggcaaagtttcgaggcataaacacacagagctgcgtgtggctgatgtgaggaatgcgggctccacgaagctccatttccagtcattaattgagctaatggaaattcagtttcttctctaagctcctaagtattggtaaataagaggaatgctttttaaaaatatcaaagcggccaaataaaacactctgggagtggctgtaattcccatcccaaaagccttctttccatttggtgacctgtatcgaggagggcctgctgaaggccacatgggtggtctttgcgccccacctcttcaggactcatagagctgtggggggagaacaggggcagttcttctggaaacaacacttatgggctccatgaggaaaagagagaatacttcacttgtgtccatcaaagatttgcatatttgagatcatattatctaccaggtgttaaggcctttagacaattatcattttatgagtaagttcatatttatagtcctaatttctgaaccttcacttccttgttttaaatcatgatggatgggacttctatcttatccctaactcagctttggtccttacgtttggattgtgttcatgaaaaccggcttattgggaggagtttgttaccaagaaacccaacttcttcaggaatttggacttagggttaagagtgtctgaccgtgatcatagcatagaccgagtctgcaccaggtcctgggttttgcaccccaccaccaccaccccagaagcagcagcagctccacaacaaaagtttcacaaggaaatttgagatctggaattatataagtatcaccaatactgtggggtgtgtccgatctgtctctttaagtggagttgtgttgaaatgggtatttaatgcagaaacgggtgtgataaggtttgtgagcaatgttagaagactgaagaatccattttccaaattgagaaaagtggaccttaggcagagaggttaaaggattaggaagggtcacagactaattagtggcaggtctggagccaaagtcctcgtgtgagcacttgctgcacccagaaaggtcccactctttgtccagtccatccttgccttccaaatctaaactacagctctcttggactcctcactgcttgcatcttggcccattttctaacacgtcaactcaagccgtctttgttctcagtattagtgtgggctgtgaatcaggccacctgaggctattttcagaaaagtgttccatatttgtccctttagcattaaaccatcacctcgcagtttttaattttgtagtgtgattctgatctcacacaagtttttatctgcatagttaggattgtgtgtgtctctctctccccccttaatttccttctgcagaacccctttcctctttatcagcccccattttaaacaggaacttgctgtgctaactttgatccgctttaagcagcagtaactcagaaggcataaatcaccttatctaagactgggcccccgccgccgagggcttttctttctgggactctgcaatcaggaatgcagaacaataaaaagtatggtgcaaaagaagttttatggcagctttgagagcaggaaattaagtttctttaacatgcagatgggtgaagggctgttctctggcatctagaagagcctcagaggaaggaatgtcagtttataatcattttagataggatgcaaattgtagaaggtcctctggtcatttcatcctggagcccacacagacaactaactaactgcctctgctgtttaagaagaacaatttctcatctgactgtgttgaaatactcttttttgttttgcttgcaacaaaagctatgtaatattacatctgtaggcaaagactgcaaagtagactttatgaagcaagggatgtatgcacaacagatggagttttactaggtcaaccatctgtgtgtccttcttaaacatttactgtctgctaacccaactgatggcaaatacaagatgctgttctgtgcattgccattgtctgtgcacagtgcataggtaatccttagtcccagtacacaggggtgttcctctgtgtctttttctcaaccaatgacctgttcacaaggtcaaatcaaaactgttccgtggcagtcctggcagtagttctgtgagccaaataaatggctggcaatctgtccagtacatatgtgggctttgttttcatctcagctgggcatctaaactggagaagaacacctttgctgcctttctaggggcgccaaggggacattcttggacagctaggccttgaacttggctgccattcccatttcttttggattttgagatagggctgccaagctttggtcaagttcctcagttgccttgataagatgaaccactgaaggctttgtggtttggagagctcaggttatgtcgatgccaggcacacagagttatttatcctccttatgaattcctgctaaacttcacgctagaacacttaattaggaattggttcttaacacaggctaatattcagtttatgtgcttcagtgtgtataatcaagttataaattttatgtattcagcagagtaagttaatatattttagtagtgatttaattcattatgctttataaagtactctgagaataattgtagtccatctcctttatttaaatgtccaataacatagatattgttatttactattatttatcagagcttctcctttagataatgttatcattttgaaaatgaggttcctgtgtgaatgggaagtagtgttaattttacacgacatttttcattcacatttccacagactaaaaggttgtccgttggtgaatttagaaggcctgcttctcattcaggaagctagcactcccctcttcaccttcctggacacgagaacacaaaatgcccatttctgttctttcgacttatattttggcaccatgaaagcactcaaagcctgtgataattgcaaatggaatgtcgaatgatgatctgttctagaagcgatgtaagcagattgcattacagagaactcccagaatgcatcacccctgcagtaagcctgtctgtctttcaggttgaccccctgtttacagtgccggcaccaccgccgccgattgccagcagtctcgcacctcagattccgccctcctactttcccccatcttcatccaatattgcagcaccagtcgaacagcttttggttcggactcggtccgtgggtgtcaatacgtgtgaagttggagtagtgacagagccagagtgtcttgggccctgtgaacctgggaccagtgtcaatttggaagggatcgtgtggcatgaaacagaagaaggtaaatatgttttatttttatttatctccctctgccctcttctccgtgatgtatctctgtccatctgtgaggggaatttattttccttgtggtttgagaggatagaaaggtgatttgtaggttctctgactcttgggttaaataatgatcctgtgttcctggttgcctttaccttaaagatgagccaaagccttaaaagaggcgtcttcatgctgagggctaacatggagagcctgtgagagctggggtcaggagcagctttctcctaaaaggtatcaaggagacatggctcaagttcctttcatttgtggtatgccagccaatttgtctgtctctgtgttgtggggtcttatatttatctacctccttacctccctactgaatcaaacagtgccccttgtgcatagccagggccgttgtcatgatgcagtcgaggctggttggtgctcagagctaataagctaaggttaaaggtttaaagcccagttgagccagccatctcttctgagtctccagacagaacctttcttgccccttaactcagcaagccatttggcaagtgcagcccattagtcaccagggaaacacggcccccgggaaactggatgcatctatcaccgccgttgggaatataagccaagagtaccagtcatgccgatagtccagatcgggtcaccatgtctcatagcacacggcgtacggtatttcaagtggcgtgcatcattaacaggtcagaagatactgaaaagcagctctcagagatggggagcagtctgcacaccgggttgtctcaagaggacccttggaaaatggacgtggggaacctttctcccctttcagctaggttggtcaagggtaaaagagatggatgacagctaccaatgcttgggtatctgtgagaagagttaggacaaagctgagtatgacatgaaggggctgagactccatcactagatgggtttgtctgaattaaggagggaaaaggaggaggcaaacttgaaggaagaagataggatacatgctacagagacctagaggcatccctctgagggctttattgctggaaagaagtagtagctctgactgtttcaagaaaaaaacgaagattggagacatctttgaattccactataacattatatgtatttttgtatgttttgtttcttgataaaaaatttaaaaacaaagattgtagctggtgctagtgatgaagaaaaacatattaactatacagtaaaagggagtgaaaatagctgtaggattagttcttgtttatttaaatagaagtgacacctaaactttgatttttagacttttttttccatcttctctatcgatgcattttagttttggtttgctggcagtctgaaaagccaattaatgcaatactgtgagaaaatagggctggaatgtgattggagagtagagaaatttaaacttttcttatcttgcctgtttgtttaaggcccacttccaagaccaaggggccagttatatggaattctgggagccgcccctcaggttgtccggttttcctccctagagttctcctgtagagcagatggcagagaacggattcaggttgatcctccctcttgtggaaagagaattaagacacgaaaaacataacactaattaattagctatataaagattttcagcaacagagggaaaaaagatttgaagaaaatatgagctaacttccataaacttgaaattgagatttcttggaaaattcactcattaaaatgagtctctgtcttcctgttttttaatggactcattgcttgtcatgattttatttatgtaagtgtggagtagggcaggcttcctgcggtgtaacctcactgggtggtagatgttataaaattagccacaagctttctgggacagttgggttatttttcagtttgcctagaagtctgtttagttttgacttttaaccttggcctctaataaaagtggattatttggagcagagggcgttgaggggtcgtgctgaatagccaaagcaatgcatacattgaacagaatccggatgctctggtcctatgtttaaagagcttgaagatattgttttgatagtatacaaataatgaaagccatagcacttccaccctggcctctaaaaaatggtttttgatttaaaaaaaagatattttttgagacagcttcagtctgtattggaggctgatgttgaattcatgaacccctggcctctgccgcattgggattcaaagcctgtgccaccatgcctggtggtctccagaatttgatagaattggttttctttgccttcacccagccatatctgtggctgctcctggtagtgtctctgcactggctcctgactacagaagcaaggcatagtagctgaccatgggcaggcccagtctccttaccacctcatgacacatgcagatgtttcctctggtggtgtaaggagctacagccactcatagacttatttttgctggacaaactagatttctggcctctgtagaatgtaagaactcctctttatggaagccttagtcctaagatgtgtatttaacacacacccattttcaagatgcgtacatttacgttatttctttctctgtacagtgttcagagtccttggcccccatttaaaggttaagctaatggacttcttcaccttctcaggaaaagcaaacacattcagaggcagttattttacagagctcagaatggaagggggagcttggggttttaggaaggggaaaggtataaaaagatgcaatagtttgtccaatgaagtttgataaaaggaacgactgcatatcctcacacttataacactgttgggtgcctgggactaagggcctataaactaaattgaatcaaatccattcttactatgacagggagtgttacacacacacacacacacaccccaaacataattcgatagtgtggaggtcgtctgcgcctatgttttaatttgatagtgcattcgaatcccaagaattcatagttacagtcgtcacaggacagtgggtattttggcagcctcttggaggtggtaggaataaagactggcttgaggaataaagaactttggcttaagtatttagctgcctcctgaatttggaaagcctcattagggttggcttcttttcgttagcctttacttctccagttacaacctgtaagtgaaattctagttgttcaagaaccaagttgtgcatgggaataaagtgttaataacgaagttgctcctggaaaaaattagcaggtttcagactgtgcctaataggagagaaaaactattactacatgtgggtgtttgcttattctactctgatctttcttctccaagatgaacgtttaggagccatgatggattgtatgaaatgactcacagatgttggaggaatttccatagcatttcactcgtgacatttgggacacacatgcctaaaatataagagtttgtttgaaattttgctcttaaaaatgggggggggggaaattggtgaaatcagcactatatgtaaatacatgtgttgagtttggctttaggagtcttgagtgtgttttctttagcattttgtttaaggggggattttcaagttattatttatttttaattatgtttacgtgagtgcatctatggacatgtacccattagcacaggtacccaaggaggtccaaagaggatttgaattcccaaagctggagtttcaggtggctacattgcagggcaccctgggtgctggcaactgaactcttgaccactgagccagctctccagcccctcagtcatgcttcttagtgggcctttatttgggtaggtggccacatatgaaagaaaaaaaaaaaaacttggttcagccatgtccatgtccattcttataataacccttcccctcctctttagttctgtaatggtaaactgagtaaagccaaggggagaaaggaaaagtggcaattgccaaggatggcctcttgaacggctatagagcatgagttctcagcactgtgttgttggacctctgagaaaggaatggatgcctttcagatagcatccctaggcaccgagtcaggctgaattggtgtagatgtgggtattgatctggtttggttaatgacctgccattgatggtataatattccaaaagtgattgggggagcatgggagagaaaaggagaaagagnnnnnnnnnnnnnnnnnnnnagaaaaggagaaagagagatgctaggttctttgtaagcaccttgaatcctttctctttaagggaatgtacatgtattccttgtctcaagtgcccaagcataaaatggactaagggactcttgcctttgcccagtggttgatgagatctaccaagaagatgctgaaggatggaaggagagcatcgttgttcagttagtagtaagggctgtgggaagccttgaccattcaaatgaaccacagaggatttggagactagccctcagagacaaccaatcgatatcacccttcctaatctagtgggaggcaccttactgttgcgttctcaaatgagccagggactataggttaatttctttgtagcctctggtgaattacttttgaaacagaccagaaaccaagagtagcgctaccgcagcatctgtgctggagaaggtggatctcatttgcagttccagcaattcttagatggacagagagaatgcgagcttgaggccagcttgggctccagagagcccctggctacaaacaagcaagcagacaaacaaaccaatcttgcttaaagcgtcaatgggaaatttcctaggagacagcggaataccagtggctcacggagtatgactgtaacaagtcagaattctgttgaaaggaagaatgccatataggaatatcttcacctggtgtcctgtgcttttgctttccagtgggggtgaggcttaggaagtgattgttttaaaggtaattaactggagaaataaatgactcttttttaaaaaccattagagacgtttgtaacttctgcttctcttggatccaaagtcataaatgtgaagtgcagtgagtttcaagataactcattaaagggcaaatgatctgcataattgaggatagtctaaaatacaatgttattatgattcttattctgccgtatttacttactgatccccaccacttcaaacaaaacatttcttttaaaattctgattaatttgagaagagattccgtactaatccaggcgtccaccgtgttttctgtgactaagcatagagtttgtgccatgctttgctgggtgagaaactgttattgaggttcatagctgtgttgttgtaaacctgtctgtgattcacaggggcatgaaatgacactgttgatttgtatgcttcattatccacacccattactgagctagtcggtgactggaactggtgaccagtgctcagtagaaattttgtcagctcatgtatttgtcaaaaataaatagtactttaattactacactggtaagaaaaaggttttagccttgattctcaatggactcccatggaggttttgacagactgaaggaagtatttattataatttatcccactgcgtgcactagccatgaacttttccatagccttcgttgcccgacttacagagtggtgacaatgagtacatttagtcccttgaaagccaccgtcactggtggcagaacagtgccgagcttctatcttccaggttgcatgttcatgtggcaaggaaacacacatcaaaaaccaaagtgtgtgttcacaggacacaaaccctgtctttacttctgcttattctgagtttagggttgatttgtttttgagagaatcttagtaagttgtcctagaaccaagccatcctcctccttcagctgggtagctcgggtttcaagtgtaaacagctgtgttcatccaacatctttaaattaagaaaagatttgcaataacaacagaatgctgggaagtgatgtgagtgctgttctgctgaaggaaagtgggcacactgtggacagagtgagcattggtactgtgtggtttttgttggaaagccccagggcagccacctttcctgttatcaagatgaatagcgtgctgctttcaagtaggacttggctcactgttttagttcggcctttactttttggttatctcaatccattctttggtggtgacaccgggtgttaagtaatgaaggagaagccttgaactcacttcataaagacatttaaaaacctttttcgtccctttatctcaaagacaaacttctatatttgaatatagaacttcaagcatttaaaagtaaatttttcttaggacttaggtatgagaaaagatgaaagctgtcttgtaaggtgtgtgtgtgtgtgtgtgtgtgcaactgaagtattttcctttttttccctaaaagaaggaatttataaagaaattttgaaggagtcttgatgttacagtgactttgaactgtagatagatttataattacaaatggaaatgaactcactatttgaaagaatagctactgactcatcagatagataccagctgaaannnnnnnnnnnnnnnnnnnnnnnnnnnnnnnnnnnnnnnnnnnnnnnnnnnnnnnnnnnnnnnnnnnnnnnnnnnnnnnnnnnnnnnnnnnnnnnnnnnnnnnnnnnnnnnnnnnnnnnnnnnnnnnnnnnnnnnnnnnnnnnnnnnnnnnnnnnnnnnnnnnnnnnnnnnnnnnnnnnnnnnnnnnnnnnnnnnnnnnnnnnnnnnnnnnnnnnnnnnnnnnnnnnnnnnnnnnnnnnnnnnnnnnnnnnnnnnnnnnnnnnnnnnnnnnnnnnnnnnnnnnnnnnnnnnnnnnnnnnnnnnnnnnnnnnnnnnnnnnnnnnnnnnnnnnnnnnnnnnnnnnnnnnnnnnnnnnnnnnnnnnnnnnnnnnnnnnnnnnnnnnnnnnnnnnnnnnnnnnnnnnnnnnnnnnnnnnnnnnnnnnnnnnnnnnnnnntgtgatccatgcgtgcatgcacacaaaaaccaccaatgagatcctgacttcaatggtatggggtaagtatctaacatgtgaatgttatcttttgatttctatataatagttgctattctggcaggcctagcagcgtatgcctatgatggcagcgcttgtcatttgatttacattccccggatggttagtgtcattgggcaccttttcatgtacttgttagccatttgttcatgtgttttgaagaaatgcacctcacatcctttgatggttctgtgaaatactgatggatcagaggctttgactggagatctgaaggctcacgtgttcttcctttgctggtcagatagagaggattcacagtagctctcttccaaccctgccactgccttttctccccatcagcgcctcttgctttgagggagccgttagctttatgtagtcccactaaactgttttgctcttttcttcccactggcttaacgttttcctatgcattcaaaagaatagctgggctcagatactagacccactttctaggacaaatgtttaataacatgttcattaaaaaaatctctgtcaaactgcctttgccaagtgactgggccatttctgaattctcacagggatgaataaaagctctggttactctacaccctctagtatttagtgttctcaagttctgagttttgacccatggaatgagatcttgttttgtgaagttcctgttcatctaaaggatgctgggctagaacctgcttcaccgtcctagtcaccatttgtctgtcttctgtgatggtttgtgtatgctaacatggttgggccatttgaaacaggcgtttgttttcttactatttaattagaagagctcttagtctattatagatgacaaatactctctcttgctccggtgggttttttaaggcagccatattgttacagtaccatgagtgcagattcggcgacatttctaggagacacaattttaaagcaggcttttacattttcttgagtgtgtaacatattctgctgtttctaaagtgtttctcaagatgggcgtgacagtgatctgggcatggtgaggcataactgtggtctcagcatttgagagtctggagcaagaggttcatgaattttagtctatgctatactgtatttcagacaggaaggcaccttttgctttctaagaagcatttttcactggtatggaatattctgcggaatagatataattagtataattaacatttcttcagtgctttattcacattggttccaattttagatgaatgtaagttcataggatgacatctttatataaagggagatgcttgtagatttggaatcacggtgtcagtgtcggtttttaagaaactgctgagtctataaaagcagatatttgttatatactaggacacgtggtttaatgctcttctggaattgactggatcagtgtggacacctacgatggaaggatgtgaacgcttttctttcccagcccagctttgcatccccttcatcttaatagcaaaggggattcagctccaagttctgtgtctagctcgtgatgctgatgtccacactctttgggccctgcctccatagaggcctttgctctccatcatggaaaggtttggctttggcatctgcttctgcctagaatggcattcatattaccccactccccatcgaaagggaaggaagttaaaaggggctgttaaacaccagagattcaaacccacagtgaggaaatattatttcatcatctattttctggagccccaaccatttaggcttgtcttctcaacgtttctttgttctgctctgtttcctcaaaggcaaggaagtgaggacaggatacttataaacaatccttttggtgtcataacctgttcataatacatactgtttggcacttgacatagtttagcagggtacagatttctttctggcacatctatggcctgccttgcccctctgcctgcctcctatgcttcctgtcagagtgtctcctcccttggcaggtagaactatcagggtactttttaccagtaatgtcgaccaaagcactcccacatgtccctctccagcattcctgttcaaaaagaagcttggctggtatttccttggcaaagaggaaataagccataatatgggagaaggcatagcttaggttccagatagccattctcagcaaagaaaattgccggaattaggctcatgagcacaattgcaggctatctagcagagtctgacacccattcaggagactccagagaggagcagataaaaagtgcagcgagctacacaaacccctcattgctcatttgataacttcctataacctaatggtaaattgagcagttacacgcatgttcttatttgctttgttttgtttatcataattaaatctcccagctcaataagcatctgaggtacttttgtggcatttcagtctctgaaaggtggctcttgattctttgtgacataggacaggcttggtcggtctgtgcccttttgtcagggaagtgggggccaccttattgttatggtttgaatctgcccatcctctgccaagctcacacttagaacaattggttctcagatggtagttgcactcagggaaggtacagaccctttggaatatagctggcagatgagagccaccaggcctgagacttggaaggctatgcctgcccacaggtttggcctaatgctctacttcctggttgggctaccaggtgaagagccacatgttctcactgctgtgaatgttgtcaggccttccctgctgcaatggtctgaaatcccctgaaacacagtgagtcaaaatgaatcctttcagattaaaagtggcttcctttgggcatggagttacaacagtaagaaaagcagcacacatccatgaagctctacccatctagttagcctcatgcccttaatgtgggaggctcccatagcaaaactaattatatatgtgtgtgtgtgtatatatatatatatatatatatatatatatatatataacataaaattttatttaatttttgactgttaaacatagcttttgatcatatttacaaacacaccctcctcccagactcactccttctagcttcatgttttctgtctcctcccccacccccgtgtctttctaaaacccactgaatccagtttttactgcctataaaccactgatcctcaaccaatgagtcatgaccctttggaagggggaggggtggatctaatgcttcattcacaggggccacctaagaccattctgcatatccgatatttacattactattcatgaccataggaaaatttcagttctgaagtagcaacagaaacaattttatggatgtgggtcaccacagcatgaggaactctattaaaaggtcacaacatcaggaaggttgagaaccaatgtccatagactcatgggtatggccatccgcgggagtatgaccattccccggaggccacaccatttaagtaaactgactcttcctccagctgtcaggagcccttcaggtaggaatggatgctcatgtgcccttacccctaccttaagtgtactgctgaccgatccactcatgagagcagcaaccttctcatttccagaagacactctgttgacccaattctcctgaacctctggcccttaggatttttccacccctagccccatatgctggtccccaaatcttggagggaaggctattctagcagagcagcagaacatctacctaagatgactcctggcagtatttttttcagactctcgcattcctaactaaagtaattaatctctggttgtgtgcgggtgaatagaactagttttttaaaactgccaaaaagcaaataaacactttcctgtctgttaaggttttggctgaaacatgggaactccatttggcttatagagagaaatgttttttaaatttaatattcactgaatatttttacaaaatacccccaaatgtagttttcagctatgtgcgtcataacaagaaaaataaaaacaaaaaataaaaacaaatccactttccttggaaaagaagccccacgtgctctcctaggctggtgggaggcttggatcctgccagctcttcagaagcccccatgtacatctgcagcctgtgttttgccatgtagacctccactgacagacaacttttaaagtcactcaagtcaagagagctggctaagaacatttaccatgtctcattttactggtgaagtagcagaggccaacgggtctaacgagacctaaccagggccactttcctctgggtccctcagcttcctgaatagagactactcacctctcagaatatgaaagtaagcctattacagacggtgctggaagttagtctcttcttagcaatatctctccagtatatgtatggaatggtttcttgtcctaacagatgcgtgggagtagaacctcgagctgggtggaaacagaacagggtcagctgccttggtttgatgttctagaaagctgtcaccaagatggctgcagtaagatgactgtgtgagaggtatctttctttcaatagatgtttttgagtactcaagcacagactgagcatcctctagacaggaaagcatcagagatgcatgcaactctctgcagcccctgcttgataggaagcctagtagacattttatcttctagggagggttttgttggtgatggtgttgttggtgttgctgtttgtttttgtttttgaactgatagtcagacttgaagaataaggggtccattttcaaagaaacaatgctgtgagctacttaaacttacattgactgacatgaatcttcagagacttaggagaagaatattgcctcaacccctcagttggttatttgaaaattctcaaggtgtacactgttcaagagatctcattttatgtctggcttgtgtattaagtatcttcttgaaataaataccatcagttgggccagtccccctgagcctgcggttcctttcgagcagcaggtttcctaagtatggaatttcagcgaagcatatcatgtgtcggatgtaattgttaagtctgtgagactgatttaacatcactgtctttattttctcccactgaagaaaataaagcagtatggggaatttatgacccgttgtgcagtcaagtcaggatccaaaagagaatttagaggcacaaagttccagggcttaagtgatgctttattaagaatctccttgtcctgcttggtcacctacacctaccccagagttccaggagagggtgggctggaccatacatgactgaaggggcagcgagtatagctaaacccaatccctggggacctagttttgggtttgctgatgaggagttagggttcccctctggatttgcctctttgccaggccaccttcattagtagaatcactctttatattctatttggtctgtggggaatggagaaattctagcaaggggtaggtggtcccttttggcactttaggaaaattgtgggtttcttttccaatgtagaaggaccagtttgcagaagagatttgtcagggagcccgattttgtattcttcaactatgaattctggcagcccaacttgttatggctcagtgtttgatgtcactccctcttgtatttccttctaatcattaacgaaaaatgatgaaaggataacaggagcacctggcctattggtgagcataaacacactgatcagagtgcaaaatggaaacacagcaatccctccgaggcagccagagcctttctcccactcgatggggatttttttctctttttatctctctctatctctctgtccctctcccccctccatgtgtctatgtctctatgtctatctttccattatttttaagtgtgactagtaagaaggcaggcataaaacatgactacaaaccctgggctttgtctcctgtggtaactgggcaggggagtactatgcacttcatagcaaatgctggctctgttactacctaaagcagcacgattccatagctcagggagcatttataacattttttttggttttattatctgtaatattctattatctcttcatctagctatatggcaggctcctctggagcccttagtaatgcagtactgataccctagacacatacattttggggaaaggtggatagctaaaccaagagaaagaaagctaaaccaagagaaagaaagctaaaccaagagaaagaaagctaaaccaagagaaagaaagctaaacaaagtgacaaagaaacaaacaacaataaatgaaaactgagcggccagaattgatgcagctctaggtaaggaaggtaagttgctgttaaagcaagttgtgggggttcatacttaggacctcagcattcgaaaggactggggccagaggatcgccatgagtttgacgtcagcctgggtacataatgagtttgagggcagctacactagtgatagcctgacttaaaaaataatgtagtaggattcgaaaaccaggttggggcctcacctcatccttctctctccatgtgttacatgaactcttgtgcgtacggcagcctggtgaagaaatagttaaatgtattcctgttgtgttccctgcttttttgccaacacgacaaacccctcctcttcagtttgacatcagacacatttttcataactcaaatgaaggagatgggagtggaggggtcagacatgccttgggacttggggggaatgaatacggcacactgaataaaaggaaccctggatagcagcactgtctcgggtgtcaaacctagtgctaggtttggtggcatatgcttctaatcccaatgtgtgtaaggtggagtcaggaagactgtgagtttaaggcaagtctgagagagatgaaggtacagagggtgagagggaagaaaggagagggaatgaaatcgtttgctcgagctacagtctcattgttcagtcttcagccttagctgttttctccttggccctgggcctgactttcctcatctgtgtaatggagtggattgaattgcatgatctttggtaggtctgaaggtcctccagcaaaggagtgtaatgatcttgggtgttcacggcagcatcatgtcagacttgacaggttctgcagagaaggctcagcagatcactccaatggcattattcttaaatatgctctgggctggtaccaaagtcctgctgtatgggtaggctggatttcagtcttcatgaacgtagatccatcagcacttcttcaggtaaagtgactcctgtagctcactcgaggaaaggctcactgaaggtctcatctgacaagctgttctgagccaggatagcttcactggcaggttctgagcccttggcctaacagaactgtgcaggcaccactgtgaaacagggatggtattggatgcaggcgagttaacatatgagggcagctttatttcctgtttaaattctacccaagttactcacgcacacacacgcacacatagttgaaaagtccacaggtttctcttaggctgatcacaaaaaagaatagtagattcacaccccagttttccttttctcgtggtgtgtgtgtgtgtgtgtgtgcgcgcgcgcgcatgtgtgtaagtaaatatttctttcttatttggaaacacaatgactaagctctctttttccctccaacacaaatatattttatcccacccatactcccaatataattatgagttatgagctctctatggctgtttgacgagttattctaaaacatagagccttataataacaaacatatattatgtcacagtttccttgggtcaggaatgtggaagcaacttagctgattgcttcagaccaggctgtctccagaggtttttgtcaagctgtggccagagctgttattgactgaagacttggctgaacctgaagggctctcttttgagctaacttatgtggttattggcaagctctaatctgttgtgggccatgaggataaaggttttaacatggactctccatagaaccactcacagcatggcagctggcttcttcagacagacagacagacagacagacagacagtgcacaaatcttgttgacatcctttgtcgtgttaagcttggtcctttgcctggaaggggtccttcagagactgttgacagacagacagacagactgccttggagtaactatggcttccatttcagttcacgttttaaaacctcttatttagaacctcctgttagaatcttccctttccctcctttctcaaaactctggtgtataggtatttatgtattttctgatttcagcagactttttcccaaatttttcattgtttttttttttcacagacaaatctgttctcatgtatttttcatttctaaaagcttttctttaaaaaaaaaaataggattgtttccttaagtcctccatcctacttttacggataagcctcctcttgtttcctctgaaaatacttcttttccccttatcgttagttttaacttctttctcttttgattgtgcttgatgtgaggtttctatttcacggtggtgacactcctcatgtgtctgtgggtcctgtctgtttgctcctacctgttaaggagaagacctttgtgggcctcaatgatagaataaaataaagagatgggccatttccagagcttccctgagctgtggattgccttataactttagtctgcttttatccgttttccaagaaaagctttctctacattcttgactgtcatctttcttgctgctaaatttagggaaccaatggctaaaggtattctctcttatgcaaatttgccttaatcttcctgacttatttagtgactataaaatatattatattatattatacaatgtaagtttgtagctgagaattcctggtagccattatgagatcatttcagttgatatataatatgctactgtaattatcacttaaatactgcaattagtttttttcaagattatccttatttttctttgaagatgaagcctttccacatacggcagaatggaacttggggtcctggtgcctcagattaccatgttctggggttatggtacgcctggtattgtagattgttagacacagttatccccaatgaatgagaccttcattgtgtcttattcttacacagactcttaagtttgggaacttcaaacaggagatacaacttctaatgtccccaaactcctttgattattggttatctaatgcaagattagtgactttttagaatgaactttctgcagcctttgccctgtctacctcgctatgggtccttgccagtcattcttttgaccaaagctctgctcttcttatttttatttagcaagaagagtttgtcacaccactgatattttcccaaaactcttttcagtatttgttgcgaaacccttccttctttgttgaccttctgtgaagttgtagttgagagaggtttctttctccaaaggaaagatgtgttgaacaaaaccaagttccgctgttgtatacacttgtaataccaaacttggacagggtgtgtttggaatgtctctgagcaacattgctcattaaccacacacagcacatgcaactacttgcattttcaagtattgttattttttgtctagaaagatcctgtttggttttgtctacccactttagagaaataaacagtacctgcctttatttcttgagtataaagaccaaaaacaatgatatgaacattgcattaatgtctttggggcatagacgtctgtcttcttcacaaagcatgtggccgagtctcagtcccaaaatggcctcactggatgaatattatccaaagactttattcgccaacgtacaaggtggtgattaaatctgtttctccttcccatacctctatcccacccagttcaagtctgtgctggcatggagtgggtgattgggttgggttgtataggtgtggtaggctcgaggcccttgctgttttatcagtcaagtcaatgaggtaacagacaggaagctgagggaaatagttttacaaccttgaaagtgttatcttggaggacaaggtttgtaatactggagtgaagagaagccccttttacatgggtaagtcagtgcaggcaaagctactaatttgttgttagcttcaaggagatttagagccttggtgtccctggcagttggggtgtacaataaaattctttttctcttccttcatttaagtctagggaaagctgggtgcttatagaatggtaggaccaaatgcttcttttactgatagacatagggatttgttacacagaacatttcagatttaatgtgttttgtggaagatgcactcatcctttttacttcttgagacaatcacagaaaggagaactggaggctagtccccaacctgctgttaagggatgaatccaagggaaagattttaacccccatccccgagcagagctgtctccaaactgggagaaatagacagcaaacagaaaatatacacatcagctgacatgctagctaggtggagtcctttggtaggttgttagctgagcttagctaagcctggccaaccaagtgaggtgttcacgtaagaactgaggctgattggtaaaggacttgcctaccatgcatggaaccctgacttctatccccagcatccataaagtagccatggtagtgcatagtggtaatacacccttaaagtctagccttatacatggcatggaggtgcatattggttatcccaataccagtatgaagagaggaaataaaaacaggaggagcaggcatttaccatcatccccaggttcacggtgggatcaggacacgcctgggctacatgagaccatgtctttattttacaaaacaataaaaggttcaagtggcagtactagtggggggggggggggttccaggaaagaaacggggtgcctcactctcagggtgagggtgggatgcattttgctattccctttggggaaatttgctaaggcactttaacagaggctaaggagttttaactgcctgagccctttgacaggagtattagcatagcagcttcacttgatttaagaagggaattattccaccatccacactaatctcttctggcaagaagcagaataccagcaatggcttctcacagaagatgacagggccccagacttccttcccttcctggacgggaacttgcaactcttcaaaatgttaatataacctcacggatgataacaaagtcacagaaaagtcttacatcacagaagctgtctgttttcctctcacacaattttaatagtctttagactctccctacacacatgcacaagtgttcacgtgttggggtggnnnnnnnnnnnnnnnnnnnnggtagtgcatagtggtaatacacccttaaagtctagccttatacatggcatggaggtgcatattggttatcccaataccagtatgaagagaggaaataaaaacaggaggagcaggcatttaccatcatccccaggttcacggtgggatcaggacacgcctgggctacatgagaccatgtctttattttacaaaacaataaaaggttcaagtggcagtactagtgggggggggggcaggggagacatcagttcaagctgtcttccctggttgccacttaaatttcaagtccaacctagactatatatacctgttggtggcattgagcaggacaatacagaggacaaagctcaactcaatattttttgtgtttgcttatccagaaccttcactggtagtaaagtttccattgttaattttagtgtatcatactttactatgctttctcctaaaaaaaaaaaaaaaaaaaaaaaaaaaaaaaaggtaatagctggatcaacattctagagattgcttcactgccatcttcccttcccaccctccgatggaaaacacatgaataattccttcttggaaggcttaatacagacacaataagctaagaactccctaactgaactttacaggctgaaggggatgagatataagcagcatttgaactaacttctagtcaccataatttagtaaggggtggctgccaaaagccatggaaagctttatttgatccatttatgaattaagagcctgcagtaagttaattgccacatattggggctaataaagactagcagaaagagactgcctttgggttcatgtgcagagaggaatcaaggcagagagagttgctccctgatgtctgagggtgtcctggctgtggaccttccacagagccaggcaaggatgctggtacatgtgcctcaagtctactgaagagcctttgagccagcattcacctctcaactgctgcgaggctttgctttattgatcataataagctgtttcgtcttattaaagttgcatcatggagtctggtttttaggaatcctgttgtgaattagttgcagaagaaatgatttgcttgtatttcccgacagttaacaggccaagcagatgggacagcagacctgaaatagttgggttggctgcctgccactgttctgtgaattttgatttgcatggatatgtaatggttttattattcttttattatttttggaagtacttgcctatgatgcttaagaaaattagacttcagtttcctgtaaacacactgttctaaatgaatggaactgcagtattcctcgaagactctatgctatgttacatgtgaattagctaaggacaccgtagtttactctgtcaaagatgaatatacagctggttgtggtggtacttgcttttgataccaacacttaggaggcagaggcaggaggttctccatgagatcaaggccagtctggtctacatagtaggttctaggacagctagagctacatagtaggaccctgcctcccccccccgccactccccccaaaaaaaggaaaaagaaaaagaaattgaaataaaaactaaaaagatggataaaaacacatgagtttctcctggttgaataatttttattcataattgactctgattttccctttcatttcagagagtgggaattttttccttttcttgacactgttcattaaaagaaagaataaatacaagaaggatgtctataaactttaaaagagggatttcagtgcaagtcataagcaagagtgtcatttgtgtcaagatctgcattcttgctgaaagaagagtctaatatcttgttttgattgttaatgttgaatacatgcaaaatattacttaaaatatttaaggcatcactcataaagaacaacatggaaacaaatatttgtctttctattgccaactaagaatggaactttccagtttctgagacatctgggtgagccttctgtagtcttgccttcttccttctccatgtagtcacgtaatctctattctgaaattgtgtgtgtgtgtgtgtgtgtgtgtgtgtgtaagggtcctatattttatcacagatctctaagttcctacataagatactgtttggcttttcttagtcagaatcacacacagggtttttctttggcttgcgttttccaagctggagctcattccaactgctccatctatcagactctctgaatgcatccttacaatatctcctttcttgtgcccatggacttttggactgcagccagttctttgctgtttcaaatgctgtctctccgtttccaggcttgtgtttaaacaaaccaatctccttcaaactgcacgttgctatttttccttaaggtttgtttggctaaggagatatgtcactaagtatttcaggtactacagattatgaaacaatcacttattacacacttcaaagagaggggtgcatttactcagtagtggaaggactccacagtatggcttccctcctctttgcaaccatccagataaaagccatgattgctgcaaaatgtattgcattagtgtttgctcagaacacagctcaaggggtcaagtggaattttaagacagaaaggataaatagggggagagagcagtgttactttcacctgtgggagggttcacagggcactggttcattcgtccctttgggttgctgctggcagctctctactggcactcaccagaggcaccttgagagcatctcttggaattggcagcctctcttctgcggcctgtgggccttagtatgccgtgaccttctatctcttggctttcagctcttggctcagaaactacttcctcaataaagcattccttgcctgcaatccctccaattccttttctcctacccgtccccaaacccctgtctgtttaattttcttcggggccattgtgtctaaaagtgcagctgttcccctagtgatcatctgtcttgcttcatatggctgtagttcatcttcactgtagtgcctaagccttcaagagaacacgacataaaaacagcctgaggaaattacttttacctaagtaacacaaagactgagaatatttctaaataaaggatggctgtagtctcacagaagtgaatctgggtaggcacaagagacgtgaaactaaaccattaaactattgcagtgttttctctacaaaacggggttaaggatttgggaggtagtgaatggtcatagattaaaaattagactttaaaaaacaaatgggaaagctggtactgtaaacggtgcactagctgtctgggtcactgacagcttttaggcggaacatactgtagacttcatctgcaggaacatgacattcttcaaagataaaagagtgggtcaagtttgaaggctctggaaaatgttttctttcaaatgaatttccctccaagtgaatttcagacattttcacttagtatctagacactttgggatgatttatgtccttaaccaatatgagacatattttcttttcaacacttaagatattctgagttctataaataccacccttgttgatggaatatttggaaaagtcttgttctttgaccttagtatattacttatctgaccagacaagctcaatttccaccataggagaacagttttgttttgtaaggcatattgtatttggcaaggcatagtcttctgctttgcaaagaaagtatgtttgtctaaatgtcataaatggtttaagagtgttttattaaccttaagatccactatattcttctcaatctggatttcacattcagatcatattaggattttttaaaaatgtgctttttaaagattggttcaagtttctggaccaaatatttgtgttcatttggtttaagacagatgatgcctttttccttttctttttctttttctttttcttttccttttccttttccttttccttttccttttccttttccttttccttccttccttccttccttccttccttccttccttccttccttccttccttccttccttcattactgctgttagcctgtaacttccaacatgttgctcagatgaacagagttggcacctactcatctagactaggatgtcacttcataaatgcatggtttttctgtcaaatcaccttgagattaaaacatacttctgcttatggttcttctctagtcactggctaaaagcacccaagatagtcctactgtacagcagtttctgagtcactaacactcagacacaggtttcagtgccaggtatagtttccccttcactgacatcacctgtcagtatagtttatttataatgctccagctatgcattattcctggacacagagaaatgctagcaattccaggcatgctctttcttctgcctctctcttctctctctctctctctctctctctctctctctctctctctctctctctctctctctttctctctctctttcttgctctttctgctttgtaatgcaaatctgaagatccttcttactatattgtggttatgagcaaactgttgcataattttcctattttacagacacatgctaccttttgaataattaagattaaagactttgatatttagggaaaatgttagaaatgctgcaaaaggtgtcaattatgccatttaaggaacaattattgctttctttttgtcattaaatgatcataaactacatgctatgtaaatctgagaaattaacatctcctatttggagataagtttttgatcataagaatatggcagaattagctgtattctaagttgtacaagcgatcatagttaattaaagccagaactgatgaaaagactcagtacttttgagggttctgcctcctccctcttcctgttgtctttttttaattagaggttgtctgttttgtgtttcgctgtatttcaatttcatgacttttgttttgtagagatactgagagatactctgtgtgtatgtgtgtgtgtgtctgtgtgtgtgtacaagcacatacatgttcctgtgagatgtgtcagtggatagagcacttggcaaacttgccaagaaagtgtgagggtggcagttcacatctctggcagggatggagggcgcctgccatcctagcacctggcaatcagagagaggaaatcctacttccaaactggatagctattcagaattggtaagatttaatttcaataaaaccctgccacaataaacacagaatggggacaggggagattgagaaagacactagatgttaacattgagcctccatgatcgtatacgatgctcgtgcacctacctgcatgcatgtaaacatgcatgcacatacacagagaaggagaacgagacacacaaattacttaataggatttattgaattattttattttcctaacattgtgtaagcaactaggaattaaaagtggggcaatgttttatggttgaaggctaactataaacatgcctgtacaatgtaaaattcgttgtttttaatccagtcacttgttacgttattgtgaaaaagtgagaaatctttcttacctccatctacaagtatgggactgtccagcatttctgattacttataagagccctccaaagacagttcccattggtgtatgttaagaaactaagtttaccagcaagcatttctagctttatgctgtgctgaaaggatgaacaaccttctgatgtcaagggatgctggaagtcacactattataatcaggtttcccataataggcaacagtctccaacagcatagtcgcatgtgctcagtctctcagactgtgtatttcttccaagttgagagtcagaagagtcgtctatccctcgtgttggcctttctccctggtatttctcaagagttggcaattatttagtaaaatcttgctaataagaccattgctgactacaaatgggtccatacttctttggagagagaggttttaggagatacatttgtttttcccagacttcctctgaacaatgttaggatctgagatttttttttcttcttggcatttgagacctaacatcaaaaggtatataccttcaaagaatttcatgttgctatatttaaatggtaattacattcccccctggcttagctctaagcttgataaatttcataggctcagttatttttattttattttgttggtatcatgagatgattttttttttctgaaccaaaaccacctaagctcaggttaacaatacagatgaatgctaagattgaagctctgtttcagtgttaggtgttaaaatgtttatgttctgggggaaaagtgaataatccttttgaattatttattttgtgtgagttttttaatttaagtgttggaacacagttttaagagtcaatacagcctactgcagtaatagaggacatagttagattcacttgagcagttctttagagagccatggtttccaagggaagaactgaggcagggggattttaaccctgcccatacattatggacacacatgtcttttagaagctggcctagaactcagatcaactgaccaacactatttagggaccagtatagcatgatggttagaaatagaaattcctgcaagcataaaacacagccgaattggaaatcaaccacccagacaaagcagctctgcactttgttcagctaaaagttaaatgacttaaataaaagttctttaagtagaaccctgggaatgttttctgttgtgttcctcggtagagttcttagggggaaagaatggttttctacgtgatctttgcctgtctgtttcttgactcataaatgtgaacctttctctgtagaattgggtttctgagaactagtggtttctctgtgtatttcatttctttttaaaaggcccattgacagttggacaatacgaagcatccatttcctaaccacaaaaacaactccatttctctctccatgtaaaatagttaagaacaatttgccttttgaggaagagtgtaggcggaggtgttgggattggctgtgccaccctggctgcctgctgaggtaactcttggaaacagtgggttttgtttttgtggtttccagtgacctttggctacgggtaagctatttaaaaccccaagtaggaaggtgagtcttggcacatctaggaattaggttggcctttcctcatattatggatctatttcctgaccatttacctggcacttcttttgaatattttattatctacttggtttgtaatcaagcccacccacctgattttagcctacagagtttttcccctgtctttttattccctcaagccctcagcccatgtgtattcatgtttttgctttccattcacggagacctccagctgggaaaatatagtgtgtacaatactctctgccttcagctgacattgctcataaattgcaacagaaacactgctatcagcagcttaatagcaggtagaatacagctctacatatcaagcctcagcaggacacagaatctatggttaccaaattcccagtggcgcaggggaggggcagaaagttttctaagagcgaccacagcagcattggggtgcatgttcactgaaatgaaagcagctttctgaaaaggacttggggacccgactcagtggctgctccattgacacatatctttgctgagttgttagttttgaagcactcccgaagtggtttctgtggtagcaccatgtataaaaggcaaatttgttcagttctcttcctctctttctcttctgtcctttaaaaggaaaggtctttaaaaatgtagtgggaagggttctggtttgcaaattctcgtggccttgaataggtgcacttttacctgtggggcacagtcactttcccacacaggcatttggcagaggcgccaggcccggtgcaagtgtggaaagcaagcaatgctatctcttttgtctcggtgttagtgtactgcatgtactgcgtgtactgtgtgtactgcatgtactgcgtgtactgcgtgtactgtgtgtactgcatgtactgcgtgtactgcgtgtactgcgtgtactgcgtgtactgcatgtactgcaaaagcacagagatctgaggtcacatccttagcctctccataagaaagctggacacggggccactgagatcactcatgttggtaaaggcctttcccatggaacctgagttccatcctcagaaccaacatggtagaagagaacttcctcccacgagtcgtcctcggaacttcacatgcgtgctggggcacacaaaaacatacaaccaaccaatcaatcaaaagtttaaaaaaattaaatgtgtgcctgctcacctgaaacccccagccctgtgtggggcagaaacagaagggcctctggggcttatactcagtgagagatcctgtcttgtgagaataagctggagagatgagacgtgacacctgacatcctccaatggcctgtgtgtactggtgtgcctacccccaccccaacacgtgaacacttgtgcatgtgtgtagggagagtctaaagactattaaaattgtgtgagaggaaaacagacagcttctgtgatgtaagacttttctgtgactttgttatcatccgtgaggttatattaacattttgaagagttgcaagttcccgtccaggaagggaaggaagtctggggccctgtcatcttctgtgagaagccattgctggtattctgcttcttgccagaagagattagtgtggatggtggaataattcccttcttaaatcaagtgaagctgctatgctaatactcctgtcaaagggctcaggcagttaaaactccttagcctctgttaaagtgccttagcaaatttccccaaagggaatagcaaaatgcatcccaccctcaccctgagagtgaggcaccccgtttctttcctggaaatgttcagctctgatatgtacatcttattttatatggtatatatttttttcttttatactatcctgatgaatctaaaagccaccttacatcctgtagatagagctagcaattagtatcttcagtaaatagccagtgggattggttaggatctgaagagtttgaggaaacattcagtgtgcctagagctaagaaacaaatacatcattcaaaaggaaaagggaatcgcattccacgtggtcctttcaggacagaactttgactcttgccatgtagagaaagctagggccttgaaagctaagtgtccacacgcattgacaatcccatttggcttggccagtgtgagcttcaaaatgtcctgccaaggcttccaagtagttgcaggctgacatactggctcatccccattcagaaaatacctctgcttctatgtttggaactcaagtcaagtgcatccgtgatgatgcagccccaactgttctgccatcagtcactactttctggctgatgtgataaaataaagcaaaaagtaggcaggagtctcccggctgagtcaggtgagccctgcctgtctcctactgtgatgtagtcttcttcacccagtgctgtttgaggtgtctgtggtcatggcaattcacctaatcttggctctcagagttgctttctctgtttttgtttgtttcttgacttcaaacaaattgaattttgtagcttgtttatggcaatgaatactacccatgctcatctttttaaaagttttatgtcatgaatttgatgcaaccctctttagttttagtttccttgctaattgggccaagacatttaggatttattaagtgaagactcctgggatcacctgccacaggacttcagtattgttcattctttttctttcttctttctgaaaaaaacaaacaaacaaacaaacaaaaaaaaacaacttttttcaagacagagtttctcatgaagttgggctgaccctgaacttgatatatgactgaggaggactttgaactcctgatcttgctgcctccaccattcaagtggtgagactataggtgtgtaccactctgcctagctcatgtggtgctggagacggaatctaggaccttgtgtatgctagacaagcattctgccaactaagctacatccctggtctgagaaactttttcttgattctcctgttctccaaagcattttttctaggctgtgggtcaagcctcccccaatactcagaagaagcactaagagatctagatgtgtgtctttagccatggagccatgttaagacaaaggaccgctggaagggaaggtggtgagatatacactttggtctctgtcctggtttcagttctgttcttcttagtctaaggagcccaggtaaacccttttatcttgctgggcctttaaggtccttctttctcaataaaaattccccaagatgcttttgtgcttaaaaattagttgggtcttcatttatttgttacattttttgggggaggattctcacttttagattgttagtagggttcagtaaattaatatttatgagattctttgaaagaggcttaacacacagtcagcactttatgccctcttaaattaaacaaacgtgcatggcagcattgtgcatactcatgtttatgctggtaacagtcaagggagcttttcactagccagccggcatgctctctatgttcagatttcctcgaatttgcagctctaagctacagtgactaacaacgacggcagtgttgcctacatatcaaacaaaggtggtgtgagggagaagctgaggtcatgatgacacagacatgcagggaacggtgcttttgccaggggcccagttcctctgatggtcccatagtgctattctctggattgaggcgaaaggtaaattccaagaaactatgattggggacatatctggcagctaattgctctgtaaaaattatttaagacccccccacacacacaccacccccacttctgcttaatcaaacttccacatgaccatgtgaggactggagttttgaacatagtccaaggggaagtgactttataaggttgaccccaaatccctccagcagccagggatcaggcagtgagacgacatggctgctttgaccagacttccaccagcatctgcactgggctgtgactgtgaccatggtcttttgggtttttttttttttagaatgacagattacatttttttttttaaataaaatgcttgttcttaatgttttcttgtctggtctgtgtaacacatgcctagatagcagagtttctgtttccttactgtttctatttttaaatatgcatccacataaatttagattaatttaattaattagctgattaggtattagaggccatgatttgttaaacaaattaaacacactcacactaacaagtatgtactctctctccctctctctctctctctctctctctctcacacacacacacacacacacacacacagaacaaacttaatatacctaactcatacacacacatataaagcaaacccaacttaatatgtcatacagacaagagtttaatgttaattcttacccacatctgtctcctgtactggaggccaggtagatgactcctcacaggctggccacctaacatgtataaagaaacttctttattatttggagcataaggcttaaggcttccccagaagcacagggtgaagggaaaatctagaggtcacaggcacttgtcaaagaaaagtgatggctctgcccacttctgcctggcaggagcacgctcaccaagggcacatgaagccatctgtgtcaacacagggcacaacaggaaagcatctatcgagttgtccaatgtggatacttgggaactcttcatctccctgcttcacatcgccaagcaacaaggctgaataatttttgtgtctccttgaaatcaatttgtgctgatcacacacgaaggtgggaaccacagcttttgaatatttacatcgagcaaataaaatttacgttccctgaaaggcaaagaaggctgccatttcatgcttgctaaccttcactgtgtctttctcgttgctacacacagcagcctagtaggcacaaatgttcacggccattacagagggggagctttctgctttgtcaactttggtttagaaaaagctctggtttctctattgcctttatctattacatctgtaaaatttatttaagcaatgacagatctctctctttggggctccgagtctgggagaatagccattgggatgagatttgttgaatatgactgttcattaaattgcaagtagtcagggaagctaacagtgcggatctgctatgctgggcaggttatggtctatgtttagagcctctatgtcaggtgaagaacaactgtatctcattaattacttttagaatatttaaaatggaaatagaagagtggggagagaaaagaaaagaaggtttgaaatcccagaggaaaggttccttggcctgtttatcttgcaagattccagttttcaagagttttctttcaaagggcaaaagtgggagccaggccccagcagctaggggtttaatgagtgtggagcttgtgtagcctgctagaccttcctgcattttaagagctactcctcccttttacctctttcgtaagtgctcactcttggccaacactgaaaaatgtgacttaacaaggagaagaagctgggtggcaagcatccggaccctgcgcctcatgggcaactgttttggtaggaataccatgggaatggtcaggaaattgaaaggatttttaaaaaggctttctgagggcagtgctcctgaagttaaagaaaaccaggcccagaaaaggtgggccatggttctccacacccaagatgggaacaaggagttattttgaaagtcctgggtcccagaaaagattaaaggcactgtgaagtgtgaggcaggagaaggtacccatagaaaccagatccaagcctgagattgtccaagatgtgggtaatggggaagaagtgacatcaggagtcatgaagaggtcaagacagacacaccctgatgcccacagagatgtaagcgcttctgaggaaagggatgtctggtctgtgaattttgattcctttgaaagtgaacccacgtcataagatgttagtactctatcccacagagagttctggaatcctatctccaggtcttaattacctcctgtgaacttaaagacagatttagaatggatttgagattctatgcttcttccagatgtcattttctaagacaaagtgccttatggggtaagaaatgaaatgtgggacccactggagggccacagcaggcatccctacatggccttggcatgcggggtgcagctgaatttggtgcatctgctgctctgttgcacttgctgctttcaaggctgtgtacgtgctaccaccatggtcagtttcaagtttctagggtgctgccaccgaacctggagttgagatgagattctcaccccctccagcgcgagccgttagcacacctctggtcatcatagagcatccctgtacaggatgctccatccgtgctcctgtacgaaaagcgtgctattcataaaaccatgttccgtaaccatacagaacacacatgggaacaggacaacaggagtcagatcatgttcagatctctgactttctaaccaggggacatcagttaagcatccttagagttaatttgctcattagtaagataataattaaggagcttgacacgcaagctctgggaaaacaaatgagttgatctgtgtaagaacattgatgcttgtgactaatacatggtaagttcccagtcaatgctccttgcacttcttttcctcttagcagctgtaatacaaatattagccacctgatagataagataaattttaaattgcctttttgatgcttcagtggatacctccaccccaaggctctattctatcaagattcagtaggaaaatctccagttcagtttgtctgtgggtttctacttttactagtaagtttatgtctgtctcgggatgttttgtgctgcttcgatagaatacacaggattgggcaatttataatggacagaatttattttctcacagttgtgggtctgaggaagtctaaagtcaagactctggctttgaggctaggaagatggctcaattggtaaaatgcttgccacacagcatgaggctccagatccttagctacaacaactacacatcaaagatgtgtactaggtcctatgccagcttgcttctatcgttgtgataaacaccaggtcccaaagcagcataagaggacaaaacatttctttagcttgtgcttctagaacacacgccattgtcaaggaaagtcaggatgggggtggatgaaagagggaagctggaggaagcagctgaagcagaggatatgaagggacactgcttactggttttgtttccaggcctatgttcagctatggttttatacatcctaggcccacttacctaggggtggcaccagccacagtgggcttgtccctactgtatgaagtagcacccaattcacaggctaatctgatagaagcaattcaagtgagagtgcctcttcctagatgtgtcaagttgacaaccaagatatcacattacctaaacaatagaacagctgtttgcatccttagtgctgttaaggcagtataagaatgtaagaggctctgcaatggatttatgcaagaactgtatcctgtatgtaagaccttggtgtctggggtagaagagggctgtgttctataagcagtcccccagatccataaggatgacttatctgctcggactgcattctgacaattatttggtttctctcaggttcctttcctaacttacttgtctacaaaaacaaaaagcaaaacagcaacaataacaacaaaacttaaaaaaaaaaaaagaaagaaattccgggagagcgttctatgtgaaaacaggctacatagttactctcaatttgaacacttcaaaacatctattttggtctttggagcccaatgtgtttgtaaatttaatcagctatgacaatcgtaaacatgtatcaggatttataaaacacatcgaagtcacaggaacaagactgtcgtctaaggaacaaggatttgttgcaaatttgagtttctgctgatggaattttccctagtgttcaagttgagtggtcctcagttgccccacagaatgtcatcggtcaagcccagacgctctcccagacagaaaacagtatccactgttctctgaggcgttaccctttccagaaagcccaatcaggagtcccattacatgaccataagttagcagcacatacacacacacacacacacacacacacacacacacacacacacacacacacacacacaccagactttaacatggcagtagccccgtggctttctgggaaaattgttccttgctttaagaagtgcacatgcattcatgcatacagacccatagactggaatacactatctgaaacagtataaccctttggttaaatgtcaacagttttgtagttaaaaaatctcagttaaaactttaatttagccagttagtgttagtgtttctgccccacccccattcaaaaatattgatttctaaaacgtcaaattatgatttcttccctcattctgccctgttgtttaccactttgaacaacaaaaggcatctggctctgtaacaggcctggttgggccagggtcctctggtgattaccttccatcagccactggctttcccaccctcttccagagcagtctgcttgggtaagaagagataatagcttgctaggtttccctttcaaagaagccaggaagcctttggaccaataattctgcaacagctttagagtgctggattcttcaaacaaagccgagtagcatcttgttctcttcaccccaaggccatctcgctgctgctagctgctcataaatacagctcccagtttctactgaaaacacctttagttattgtaagcgagggacatcaggaggggataataggtctgcacctcattcttccaccaggcattttcctgtcctaggtaccaaccccacagctttttgttatgaaaacaaagcaaaataaaaacaaaacaaaaaacccttatctattgcttcctgtgctcgcttccagtattattagctctgcctaaccagacagcctgtttgcagtgatgcttgatttagcaatccagggatgggaatcagattcttgtcttccatcctcctccctcctccctcctccccgtctctctccctccccacttctccctcccccacttctccctcccccacctctctctctctctctctctgtgtgtgtgtgtgtgtgtgtgtgtccctatatatgccccttctctgtgtgtgtctgtatgtatatgttcagtcttaacagaagtacaagacaacctgggaaggcatttgaaatgttgagccaggtctttcagtgtgaagaggtgtataaaacacatcccagtgatgagtaccaattaacagtgcattgctttctggaaaagacttcaagttagctgccctgcaggtcagagtcaataaagactgagttactaacaatagcctttctctcttgctgaagtcttggacataaccctaacttcatcagaccagagaaaaggagaataatgtgaacaataggagtcttgggggttgacttgagcctaatgctcagaggctgtaaaaactgccagagagcttgattgattggctcatatgctccactcctccatggagaggactaatgtttctgcctcttctgagagagtttgatgtgccacctggggtcagaacttatcagcctgtggggctaatgtttctgatgaggccaaagtgcagtcaataatttatacagaaatttgtgcttagattcacaagggaagagttttgacttgcatcccttcctccatctgaagaagtgtgaaagaacttcaagttgttgtcctgccaacagcatctttggatgcatatgataaacacttaggacaattgtgaattcaaaatgagacttttaaaaaccattttggagtgttcaaaacgaggcccaactttggaagtttcagtatccgttggtgaaatgggtagagggaagccagcatcagcagtttacatatattataaaccagactctcctagaatgtaatgaccgtgtccgttagacctagagtgactttgaagcagttctgagtgaccatgggtaaagtccccatagtagaggtctcagggtagagccagcagagagaaaatagccggcaaaaccaagaatggagacagccgaggagaactagattttggctagatgcccaaaatattctgtatgtccggtatgcagagaaacagaaggtagagttggcctcgatggctgcgcatgaccacgcatgcgtacagtgcactacagcgcccatataaacgcatattcatccagctcctagaaattgagagtaacgcaatgacacggagcagggctggtcaatcaatacccagctaagttctgttctcctgcaaaatgacagtttgctccagtaagtgctaacaaaggcccctttaccttcgccctgcagtaggagagcgctgttagtcacacttcattaggtttgtttacagaaaagagctggtctctaagcagggtattgaaatccttgtaactctatagggccttaaaggggggaaaaaaaaaagcaaccttccctccctgaaagataagaactttggaatgtgggtgggggagggtgcaaagggatctcagaccattgtcaggaaaactggtttgttcagatgggaataaaaaaagatgagttggcggttaaggtgtttctgccttgtggggaaccagaaccagtaccatcggaaccagaccagacacttccgctgtcctcactgaactgcaaagcttcaatctggcctttttgtgacctagaaaaagtgaggtgctgttgagaacctgaaatgagtcttttttaccttaaaagtaattctgaggagcggcttctagggttttaagttgtagtcaagagacagaggaggaaacgcttgctttcagcaatgaatgcttgttaggagagatgagttcctaacggttgagattagtggtctgtatatagaagcaataaaaggttctcaagtttgtggcctgctaggactatataggctaatgggttcagaagcctgactgggaagttgcttcccgtggaaggtatgcaggaagactgccctgttagtgtggaacttttcttcagcagtggcctgagttacaagagtgtaacggacgtggtcacgtgactctgactagtagaggttgagctggagctcaggaaagtacaggtgagctccagggaggactgaggctgaggagcagctgtctcagttgctgcatttgttggggatggggcacggtgctccccctggctagcgtcctttcctgcctagccttcggaattcattgcagatccctctagcttggaatagacattcctcgtcttcccctgctactttctgaatctgagctatatgtgatgtgactccatcaccaaagacataaacttttgtgctacttgtgggatatggtcactgtaggagggaacaggggtgggcaaaagcttttctgtcgagctgaactctgtaatcgagagggggctgagcccaatttctctgatattatgtcctttgtatctttactagattgcccaagatggtggtggctttatctgttgtgtaatagtcacctctttgtatgccttatgcctgtaatatctcttctccctctccccccccccctctctctctctcacacacacacacacacacacacacactacacaccctgcagttcagagagtcagttcccagtttgagctgctgttgtaaattgctattttaaatttcagcgagtggaataatagccgagtgatcatccccagcaaatgttgttggcctttgtaaagaatggctccttcagaagctctctgatttacagaggacacagctggtgggcagcagagctgtaggaatctgtgctctcctgggcctagcaagctacagatgaaaagggcccagagctggcacaaaagcaaataagcgctctgactttaaataaagcatcctaatttataggaagcctagctcttcagtcccagcgagatctatggatcagtagcagccttttgatgtggagcataattgtcaattggttcccactgtttccttataattcaggaccaggcctggttaaaaaaaaaaaaatttttttttaaagcacagtctcataatctagaattgtggtacacatattctgacaagcaattcactaacgtttaaacctgaaactctgcaaacgaccaggacctataacctggtgctgagttgggagagagacagggtgactagaggaccacctcctcctgcttttcccttgcccactcttcccctaaggccatgaggttttccattctcaacttcctctctatccatccgattcactcatctacagaactgctttgtctttcctcccagctttcccctccccaatgcctggtccagataaaaatgggaaagccggctgttacgggactcagtattcacagcgtgtggacccctctactctgggtgttgaatatgctctgttgatggggtccgatctggaggggccctttttgccttggataactgttgccatcttcactggctcctcactttgcctgtttcccagctgaagccatgacaacatgaagagcttggataagaaggagttgttgatgcaaaaaaggcacatgaggtgcagggaactgtgggaatagtgatttgatagaccatatcctttcgattatctgtcttcagtggctctgacagggagagaaggaaacctctgtccatttcactctgggagatcttggccatatgccctgtgtgcccagggccacatgtcaaaaggctgtgtcatgaaccaacactnnnnnnnnnnnnnnnnnnnnnnnnnnnnnnnnnnnnnnnnnnnnnnnnnnnnnnnnnnnnnnnnnnnnnnnnnnnnnnnnnnnnnnnnnnnnnnnnnnnnnnnnnnnnnnnnnnnnnnnnnnnnnnnnnnnnnnnnnnnnnnnnnnnnnnngggggtgggggggggggagtggattcatgccttcccaggtgggaggtgtgagaaggccttctctaatgagggaagcacttcaaagtgtgtaagaaatctgcattgaaagtccatcaaggcgattcagatttcatataaacccaagagtggctggaaagctcaagtgcagaattgggtattggaagtggctttgggctccctgatgtcaagcctagagggaagccgttacttacaggaaagcttagtcaaaaatcataaatgcagcctctttgtccaaatatatccagacacattgtactcatgccacacggcatctgcttttcctgggtatgcatttagattacttcaaatgtttgcctccaaagattccctcaaggccccccagatcccccatgcgccccttggcctttccttcccactgtgtgttggactgagccttggtgggccgtgacctgcagggattggcaccgtgcccagtgaagtgtctctctggcttattgccctgttgtagaagctcccttgagagatgtcctcttccccatcctggcactgtcatctcagacgtgctttccagcttgcccccaagtaaagactctagacactttagcagaaactgttacaggaacttgccagcaataagggtacttgtggtagtgtgaatggtgtttgtatagagaatatgttctaaaaccatcaatgccactttaggatgtctatatctgcttaacctaaaggcaaatgcttttgttactgatcattcataaaactactttctaaaggtatccatgtattttctttcatggtgcttttcattacatttgaagtatattataaaacctatgacattttgtaagcaggaaacttgcacaacataggtcttggctcttgcaatcaacaggaatttatctctaatgacctgtcaggaaatggttttgttttcagacaatctcctgtcccaggctggccttgaacacgttttttttttccctaggctgatcttaaactcttgtttgtgctaccatctcctaaatagtaggattgtaatcgtgtgccaccatgcccacccgtaggcacggcttttcttagaagttgtgtcttaggctgttgtgatgttcattcatccttctacattggtgattttcggcaagaggacactttgtccctatctccataggcagcataaagacacagccttttttatgtctttgatgacggctgtcaaaagccttgctcctgctccctgttcttcgccagtagacttcctaacaggctgttgaaatttgtagacatgggagaagctactgttactggggaagcaaggaaaagaaagccagcaagagcttcctttagctgaccagtcagctggatattgaccacctgtcttcatgggaaagaaatagatggcagtgaataagtgagagtcgagttttccaacaagctgaatcattttcccaaatcaatacagctcatcagacctcggaacaaaggctgcacgggcagtgacagagatggaagtggttctgtgttcttctgtgtattaaagcatgaggcccatgggggaaacaaggcttctctggcagtaggtttgtgtgtgtacatgtgtgtgtatgcgtgctcattcttaaagacttactaagtacattcgtaggaaggaagtccctccagattaaagcaaaaagagctatatagattgtatatggctgctcaagtattttgagggaaacaaaaaggaatgtggagactattttgtcttctaaaaggtagattagagccagcccccatctttgctttcagtgttattggggtttctcccttcttacttatggtggtgtttagacaaactcaaacaaacgtctagaaatgaacgttagcccctggcaaaccgcccaaactagtctaccatgaataaaaccagcacctcacgccctgggaatatcagcaaaacggaatgctggaccgtcgtatagaggttataattaacaaaggtagaacacttgcaatgcattccagccgccaacagagactcaccagcaaactccagtccttctgtcctttaatcattaagccctctgtgctttcacaaggtagtaagttaacgccagaacagcgtgtctgtgggctttacgactggggtggcagcacactggggcataaagtatttcattatacttccttttgtcagccctgccctatctcgcaagctccattgccatacattatttgttcagataaagcccaatgttcagggtgactaatcgcacaactgtgttccagatggtttgattacaggatgtggttaaagtaactcttcaaacattcagcccagcagtagggctctatttaaaaagaacaaaaagagaaagaaaagaaaaagaggtggggggaaaacagcaataacaacaacaaaataaaccccactatttcatggccacgtgacaacactgacttttcttgccttgatacactatacatatatccctggtgtagataataggaaaatctttttgttctttggctggcaggtatttcatgggcaaacttagttgtgaatttaaagattttgcaaaaaattataaatgttgtcctctgaaagagaatctagctgaaggtgaagcggtctgaagcccgacccgtgaataaaggcattgtatcagctccacactcggaaaaggcaccaggaccacactcaaccgaacaaagccagagagctgtcatggaaagaagttctgcacaaagagatgtgataagccccaccctgcacggtggtcagactgggacaatgtagggtaaccaaggctctgaaatagtggcatttcttctatactcattggtgtttctcttgaaaaaaataaagggaagaaaatgtaaccacagagggggagaatcgcagcacaaacgggttacagtttggagttattagaatgaggtttgcattttctgcccgagtgcacaccaagtctctccagatgtggcagtctgaagaagagttcaggaaaactttgtgattccagatttggcatctgtgatgcctgccaatgctcttgctcctgaggagggagactcttttaagactcagccttttagctgtaatataaacagatttatgcaaagccaccgggctatcagcgtttgcccagttcttgaggaagcagcttcacaaatatgaggaataataattcataagccacatatctaaccacagtggagtagaatctctccacagagaaagtctgtcctcaataagctagtgggatgttacccttattgaaaatgtacgggagcagtgagacctcaaaagccagggttctgttgagagtcctgtaagctccaatgtgttcagtgagcttcctcacttaagatgcagtgcttctccgggctgtgtatgctgacaggcaacgcaccaataacaaaggagggctgtactgttggaagagatcaggtcagcatgtacatgagtggagggaaatgttgaaggaatgtcctctcaggatatgacacacatcctcacccatgttcaaacatggaatgagtttctctcctaaggatggggaattcctcgtgagtggaaagctgtctgtgacttgagctaccatgtgagggagaccttgctgccttgaacttgtagccttcaaggttcctttggtctttcctattcctggcaaacagaaaggagagcaaactaggagattgtatcctcaaagatcttacgggctatgccctttcatgctctccttcagtagagtgttatcacagctccaggtagacagacagagagaatccatctataaaccaaggaaagggggaataatgtgctagtgagcatccatcatggtagagacaacatggagtttagtcggtgacccaggagagactggatttagctggtaagatgctatgtgtctgcggatggacaggtgctgtcaccggagtttgtcccaatttattaggaacttcagctgtccttgaggaattctatagaggcactcaagccttctttaggggagttaagtgcgatgtgagggccagccagcaagatggcagaaagggtcagggagcctgcagtcaaacctgatgacctgatttccatctcccagacccacatggtagaaggagagaactgactctcaaaagtgtttccctgacgtcctaatgtatgccgcggtgtgcaagcacatacagacacacgtagacacccccacccccgcacacaatgtaataatcgttcatttgatactgtggcataaataatggctgaagaaacttgtttcaggctggaaggacaaaagagggtgtgacctggaggggaaataatgacaagaagttattgttctttgggcagagggtgagtggagtgcttctttgggatttcagaccagagcatggcacttacagacgatatctggtgtaaatcaaggtatatttctttttcaatataaacaagatggtaggatagtatctaagtagaccttaagcgagtgctgatagtgtcttctactggtgataagactagaggaaaagggcacacacgcacatgtagaatctttggccagcattggcatcttcaccccatgtcttagctattaaatatttgaggttcttgcccatcctggtcctcttagttaatacatagatctttcaactttagtatgtatcatcatttataaatgtagatgttattaatccagattcctggcatatgtgtgtctggttctctctgtttctggtacctatcactgacccagagatgggaagtcaggtttaggattattagtttgagcgcttgctggtctaagacatatttctgagcaaggtgtgaggacagggcatgaaccaagggcatcacacctgggctctagtgattggagcctaatctaatgtgtgagattaggcgagtctaaccaagagcccactcggtaagcaccggtgatatgcaaaaccatgcttctacttctgaattatgatgcatgtctgtactggctataagactgtagactccttaagtacagaagctgaacagggtttccaacaaaatatgatccagtagcaccaaataggtacttaagaaagacccaataggtataaccaaccttgatgggcctggataggaaatagaacataaattcttatgtgacttcagtgtgtgtgtgtgtgtgtgtgtgtgtgtgtgtgtgtgtgtgtgttctagtatatgggactggtatcaacagtacaaagaagaaaatcatatggattagcctctcgatccatcctcatacagtttttttctgcagtaatatacctcaggtatttttcaaatagcccttgggtgggaagggaagggcaataaacccagagagatccttgttgttataaaaataaaaagggctctcgtagagagcccccactcccatcgcacaggcagggcgttcaggagcataagtgtgcttgggatctaaatctttggggaactaaggtatgtgccagtctaatctgtatagagaggaacgtaactttaagcctggggttataaaatccaaacctgtgcttgctgaggactagttctcatctgacctttctcactcactaatttaagcctttagtaagttatgagttctatatgggcgtgggttacaagatgtttgaaatttgtaatttcattaaaataattttaaaaatatatacacttggattattgattgagagagggtcttcctatgtagccctagctggcttggacgttgctatgtagaccaggctggcttccagctcacagcatcacccccctctgcctagaaacaagtctgtgccatcacccccaacattttccacatttcagaggtaaccctcttaatttggaccttcagaatggcgtgttttctaaacgtggatcttcctaaaacaaaaaacaaaaaacaaaacaaccccccaaaaaccaaaaacaataacaacagtacattgtagttcatagaggaaagttgcttaacctctccactgacttagagccacagttgtcaatggtggcactgtgaagagacttgtacacatcaagacagaccaccacaggcccatctctaattagcattacttgagaggactctccctgagaggggagcttttgttttgagcgttttaaatccagactgtttttaggaaaaaacaaaaacaaaaagcctagggtgacttatttaggcttcctgaagttgaagtaggcttttctttacagccttttactactcccggtacagacaaccacgtgacccacgtggcttctaggcagtagcagctgtgaactgttttcatgaggaagttggaactgcagttcatcctttgtgaccgtttcaacctgcggaccaagatagccactgattgatggcctgtgtggttgggtcccttccttttccctggcccagttaccctcgcctggtttgaggccgcagatttgggctctgcgtgcatggcctgttggcagtatgatggggaccattgtgggggcggggatgtggagcctgcttccagcttccagggctttggtgaggggctctagcgatgctttcgcttccccgcggtggttgaggggaagctgaagctttctcctgcccagccctttctccttgccttgtcttccagtcttcaggccagccgcatcgggccagccaatcagacgcaagcgttcgctgcaggcactggccaatcggccgcccgcatttgctggaaacgcgaaacccttaggggaaaagcagtaacaaaagcctttcactgcagacaaatgttaagtgtctgtgcagacttttcctgtttttaattttattaccgcaagaatggagggtttgttgtttctttcatgtttcctttcaagcaattttaattatacatttgtgctacatcagggactctggaacgcagtgatttcagcctattgcctctgaagctaaaatgcagtaaccttctggcaatacagatacattcctgcactgtaaatatagctgacatgctaaagaattttaagcagctgcagaggtctctgacaccacacacagtgccccagagagcagatgatgagaaagccagcccaatctgcccccctcctccatgccccacccctctttcctgaagggatgtgctcatacagactcctttccgattgttctgtcttgtgcagtttttgaccgaatgcctaattaccatcgattctcactgcaatgggatttttttcctactcaatggttaaaccccacccccacccccttgggagaatcacaaaggaatcaagcatgatttgaggcgattcttcctagcttttttccccccatagctagactattgctacaatagtaggtggaatttacagtgagtaaattcagctgtcatataacttatagcagtctcaaccatatggaaaacaatttttaaatctccttttgagattttggggagaaattttccatgattcagtagttgagtcctgatcattcagatattttatcttctttttaaagattccccagtaaaaagagtcctgttgctttatgtggtttccaaaatggcagatagcacaggagaacaagcctcccaggaaagacttggaggaatggcctctgagggcggaagtgtgggcaccgaaagaaacaaaggctcctttaaatgtttcatttatttaccctactctgaatatagctttgttacaaatatgctttaaggatgtgatttttgttttgttttgttttaaatggcacttgtccccaagagaacaagcctcgtgttagatgttgtttcccagtgacatttggcatactaagcatgctttagtttagtatttcacagatgcagcgctcaattaaagtgtctgtctgctgagcagccgaggaagaagcaggatggctggaaggaaacatgagcgtgcgttcatttttttttttttttttttgagttctcttctaatcctctgtagcaaatgcttaccgaagttgactgaagataaccccaagagcagatgcattgtgcacacttatttccttaagagagctattttaagagcctctgagacaagaccaagcagtgacacagagcccgttctgaggttgatatttgtctcacacaggcgaggaggggaggatcaagaagaaatcacagctgccccaaggacccactttttcctctgtgcctatttttacatatctgcaagattttccccccaccctcttaataaaaaaaaaaagttagcattgttttctattgttgaattggaaaccagattccttttagtcatcctctgccttaagcactggtaactcgggcttggtttatgttggctgcctgccaaaggaaagcaattatgtgtaataatagaaaaattaagaggtgaatgttactgttttacagcaggacatggcaaaaaccatttccttctgtcagcaatatcttgatcacaccctcacacactctcaccctttgcaccacactcatgaacgcacgcgcacatacacacacactcacagagagggggtgagggggtgggtggaagagagagagagagagagagagagagagagagagagaaagagacatatttcctgtgggttttaacttgaggtcactgaaaccagaaagaggaagggtgcaaaccacaggttttgaaagccaagtgagaaaagaactttgctggtaaaaataatatcaatgaatgaagtcgaaataaagtactaggtgataaatgcgcccccgttcaccctccactctcccttccaggtgtcctagtggtcaatgtcacatggaggaacaaaacctacgtggggaccctcctagactgcaccaagcacgactgggcccctccccggtaggtgccttttctttcttgctccatcctctgctcctcccatcctgtttttgcatggaaaccatagaaagaaattagtaatatataaaactcttcctgtaattgaaaccaggcaaaggagaaatgagccattcagccctgagccagtaaaacccagatgctagctgtcttctcctaccagatctctcctcctctcacttccctctctcctttgttttcctctctctctctctctctctctctctctctctctctctctctctctctnnnnnnnnnnnnnnnnnnnntcccttctcccccccccccccttaaatggggatttgaactagttgaaagctagctctctgagctgctttcctttgattctctgtggatgaacaacataatccacagggcagcctggccctgggctgatgtaccagtacaaacagaggctggtcttctcttggctgcacctcactctcaagccaccagggcagtgggtcctctttgctaccttgtgtccctgagctcctccctggctctttcggagatgctcattatgacccacttattactcgcttccctaggttttgcgaatcaccgacaagtgacctggaaatgcgagggggccggggcagagggaagagagcgaggtctgccgcggctgccccaggctccgaggtcagcttcaccgagtccagagggctgcagagcaagaacagagggggagccaatgggaaagggaggcgtggcagcctcaacgccagcggacgaaggacacccccaaactgtgctgcagaggacataaaagccagcccttcctcaaccaacaaaaggaagaacaagcccccaatggagttggatctgaactcgagctctgaggacagtaagcccgggaagcgagtgcgcacgaattccagaagcacgcctaccactcctcaggggaagccagagactacttttttggaccaaggctgctcctctccagtgttaattgattgtccccacccaaactgcaacaaaaaatataagcacataaacggcctgaggtaccaccaggcacatgcgcacttagacccggaaaacaaactagagttcgagccggatagcgaggacaagatctcagactgtgaggaagccttgagcaacgtggccctcgaatgcaacgagtcaagcacaagtgtgtcatcatacgatcagacgaaagcacctgggtcccccggggctgggaacccccctgggacacccaagggaaagagagagcacgtgagcaatggcccaggtcctattataggttcgaaaactggcaagaattctggcaagaagaggggccttaacaacgaactgaacaaccttccggtcatctccaacatgacggccgctttagacatttgttcagccacagacagcaatctaacggcggaaatgcccaaattggaagcggaaggactgattgacaagaaaagtttgggggataaagaaaagggcaaaaaagcaaacaattgcaaaatggacaaaaacctctccaaactgaaaagcgcccgccccattgcccccgcccctgcccctacgcccccacagctgattgctataccgactgcagccttcacatccaccaccacagggaccatacctggactgccctccctcacgaccactgtggtccaggctacaccaaagagccctccattgaaacctattcaaccaaagcccacaattatgggggagcccatcaccgtgaacccagctctggtgtcactcaaagacagaaagaaaaaggagaagcgaaagctcaaggacaaagaagggaaagagactggaggtcccaaaatggatgctaagctggggaagctggaggaagccaaggcggctagcaaggatttgtctgggcattttttaaaggaccatctcggtaagagcgaagggctggctaatggattgtcagagtctcaggagagccgcatggccagcatcaaagccgaggccgataaggtttacacattcacggacaatgcccccagcccttccatcgggagtgcctcacgcatggaatgcagtaccttggtgaatgggcaagcacccatggcaccactgcatgtattgacccagaatggggctgagagcgcagcagctaagaccagcagtccagcctattcggacatatcagatgctgcagatgatggcggttctgacagcaggtcagagggcatgaggtcaaaggccagttccccatcggataccttttctaacaaagacggtgttgtgaaagggcatccttcaacttcagcacagccatctcagctgaaagagtcccattctccctattaccatggctatgagccttactattctccgagttacatgcaccctggacaggttggtgccccggcagctgggaatggtgggagcacacagggcatgaagatcaagaaggagtcagaggaagatgcggagaagaaagacaaggcggaacagttggagtccaagaaagtagaccatacttctgcacccctgcagcctcagcaccagtcagtcatcacccagagacaccctgccctggctcagtcactttattacggccagtatgcctacgggctctatatggaccagaaatctctgatggctaccagccctgcctacagacagcagtatgagaagtactatgaggaccagagactggcagagcagaaaatggcccagagtgggagaggagactgtgaaagaaaggctgaactccccttgaaagaactgggcaaggaagacaataagcagaaaaacatgccatcagccactatctcaaaagctccctctaccccggagcctaacaaaaaccattctaaactagggccatcagtgcctaataaaactgaggagacaggtaaatcacagcttctctccagtcaccagcagcagcttcaggccgacagcttcaaagctaagcagatggaaaaccaccagcttattaaggaggctgtagaaatgaagtctgtcatggactctatgaagcagacaggtgtagacccaacctcgagatttaaacaagtaagattgtggagtgtggcccccgacagacagggagcagtctgagttgtgcacatgtcttgggcttgatcttgctagacatctaagcagtgggaggaagccgtcgtcagggggtttccctcttcccttgagaagtatgatccttgggagttcctgtacaactctaaaatgtacatgactcactgaggccatggtgtgtagctaagggatctctgggcatgcgccctgcagctatgtgttacctaagagtaattaattctgcggaggactcttgatttcttcatgagccaaagatgaaggcattttactaaagggcctcagaagtctctcaaattctgagatttcatttcctgtctctgaaacacttggagatatatatatatatatatatatatatatatatatatataaagatttttaaacccaggtcactgagttcctacttcccattcatcatttaatctaaggaagtgtgagcacctggtatctcttacaaagaggtctgagatgtctgggtttctggtttatgttctgtttggaacccaaagtagaactcttgagctgtggttttttataaggagtcagaagctggaggtgacagttctcaggacagttcctccacccaggctgagtgcacttgaagtgcagtcaccataaaaccagacacatagctagttctgcgaccgtcactccctgctggtattccccagcatcaacaccccaactttactacacccggtgtttgccccctagtgagtcagaacaacaagggttcttaactgctatgtttccagccagtgttgcgattgagggccaacttcaaatcctcagtcaagacctgaaccctaggtggagttacaccatgagtgggctgagtcatgaagagggtttcaagcctcagtcccgtgcccaccatagctctaaatcggctgtcgtctcccaaggttaccggagaacaagacaatttaaaaggcccatgaatgggtttgctttctaataagcaaaccataatacatgccattggtttgatatttgggctttcgattcaagatgttaacatattaatgagccagcatagtgagatcctcagctgtagtcagtgaagaaaatgtgttaggaagccaagagtttatttttgcctaattggtgttaataactgtaataactgcttaaaatttttaccgttagcttgaggtagagtttttgaaatcccttttacctgtgtgagataacaaaaggaaaacatagactgaattaaatatctttgaggatgttattatctaaggccttttaacccagctgccatgtgaccttgatgttggctgaactgtaaaagcattggtttagcctgtggtacgaggactgatgctaacacctacctcagacattttttttttcctttcagagtaggttgaacagcacctggtcacttcgaatgaaataacaataaatactgctgccatgtaaattaacaggtttgctttgcagatgatgacattttaagacagatctttattttcaaaccaggatccagagtcaaggacatggcaccattatgtataccagcccaagtacctggaccaacaaaagccagaagaacttgacagagaaaagaaattgaaagaggacagtccaaggaagactcctaacaaagagagtggcgtgtccagtctccccgtgtcattaacaaacatcaaagaggagcccaaagagggcaagcgtcctgattcccagtcggtggaggagaacaagctaaagaatgatgatcggaagacaccggtgaactggaaggactctcgggggacacgagtggccgtgtcctcacccatgagtcagcaccagtcctacatacaatacttgcatgcttatccttacccacagatgtatgaccccagccaccctgcataccgggctgtctctcctgtcttaatgcacagttaccctggtacgtgttacgggttctaactacgttggcgggaagaggctgtgttcaaatgatagctattaacaactggagatgaatcagaaacttcccagatgtctttcggtttggcttgttttgggggctgcttagagtgccaaagaggaaactgatttaatgggagatttttatattttgtaaggaaatgtcaagagtccttgggctctagcttccataccttctgatggcttactatagacgtttagactgacagatactttattgcctgtggaaatattctaagcacttactgtcataatcattatagttaccgtttctttcacttaagcggacacataaatggatgaagtagctataagctcaattctgtttacatcctcccttcatcacgacgaattaaccagagaagaaaatcagagaacctagacacagataaataatcatgtagcccattcttaatgtaaccccttattttaggatgtctgatttgtatgccccaaaaaaatcacatgttccagccgatttcttgttgttgttgttgttgttgttttttaagatgtatcctgtaacatgatgtgacatttgttgtttatctgcaggggcctatctctctccaggatttcattatcctgtttatggaaagatgtctgggagagaagaggcagagaaagtcaatactagtcccagcatcaacacaaaaacagccagcgaagccaaagccctggacctactccaacatcacgccaaccaataccgcagcaagtcccctgctgtaagcctccttttgttggtagttaaaaggccatgtttggtgggggaagggagacaagaaacagaacagtcttgaaagagaaatggtttagaaacccagctgggatttcaggatgctgttctattccaatacataaagaatggaatcttgaaatataagatgtggtcacacaggagtggaaaaaaatgtcattgaagcctttgtgggaacggggagattttctgttgcaaaactgtcgtgttctttacctacccaggaggagatgtgttagggagaaatttaaagttatagtgacttgtacaaaatagtgtaaatgttacaacattaggaaagtaaatgctggaagtttagtttatactacccttgttactaagcagtttagaggccacaaacttttaacctatttgacaagttgaacttttgctaaatgccttcttaaggatgggggtgtagctcggtggtaggatgcttgcctgtcatgtgccaaggcaacatccctagcctgaaaaagaaacatcaacgaagacacaaatgaaaacaaaacaaaacaaatccaaacaaacctaaaatacgttttcttcagaaacaactttcaaaaattgactttttttttttcacaaatggaaaggcttgcttccttttaagacagtcgacagtagcaaatgtagccagcaattatgtgacagtggttgatagaaaaatgaattcaaccaagacagtccagctagcttgtgaggtgaccagacagatgtcacccctgtcccctgtgctcgcctaaccacagtagacactcgagtttcagatccttctgatgaccatggtattcacatgttccatactgaagaagctcatgtgaagcaatgctgagggttcatgacacaccattaccattaactttgtacagacacttgagcctgagttgcatggcataggagtaaaggctgcatctgctgcctgctggtcttgatgcattatcctgtcctcatcgttccacaggagagttacaagaaatgtatctctgtgaaagatgtactcccagagaagtgacaactgctagtcctaaatactgcttataaagagaccaaagaaaagccatagctcctgggtagaaaagaaaagggggtgagatgaataagatggggcgtccacagggcgaacataaccactaccaagaaactagaaaaggtgatcgatccccgcccgatcctttttctgtaagttctcctttcagtgcacgcagacgttgttccactgagaacctgccgtgggaaaggagagctaggttctaaaagggagaaatgtgtttgagaaacactgtccttaatcctctcggatgtggaagatgtggaatttgtggtgacttttcagaattgaataatctggactgtgggcagggcagtgctttcctgctgattctgcccacccttgagtacgcaagaaattggttcccgaacctctcggttctcaaaatctgaagatactttataaagtgatgacacagattttgcctgtcaacctacattcatctttgtatttttagtcatccccagattacctccaagaatctactacaacaaaagcatcatctgagagtcctcagactgcgctgcttaggggataatggcaattaaaccaggcttaatacccttactgtgccagtttccttcagaaaactgttcatccaggctagctaagtcacacaagtggggctcgtgcatgcagtcaggagaattataaagtgattaaactatgtgtgcagcataaatattgtatattgttgcatgaatttgggtgtggatctttgtaagaacacaatgaattctttgttgggttttgatctttgagacattttttttttctcagtatagccctggaactcactttgtagatcagcctggcctctgtctcagagatctgcctctgcctctgcctctgcctctgcctctgcctctgcctctgcctctgcctctgcctctgcctctgcctctgcctctgcctctgcctctgcctctgcctctgcctctgcctctgcctctgcctctgcctctgcctctgcctctaggattaaaccatgcctgaacacaataaatactgttttaaaaaaaaaaaaaaaacatgagatgaacttccttcacaacgtataaaggtataattagaaaacttaacctttaaaaatagtcttagaaaatcctttaaaaatttcatatattaaaaaatgtttctgaaagtcaccaattggtttctaaatagccattttgagtagtgaatcttgagaacatttttaggaaatatttgcagaaaatattggtgccatttagatgactgtgggaggttctctattgttagcttcgctcttttaaatcaaatgcctatcttttgaagttttcttccactggtataggatttttagtctgtatctactcaatgacctgaatgaaatactatcgatagacggcgaaaggtgttttggtatttctgatgtttgtatgtcagcaccttaaaggagagcatttctcttttcagcctgtggagaaggcttccacggagcgagaacgggaagcagagcgggaacgggatcgccactcccccttcagccagcggcacctgcacacacaccaccacacccatgttggcatgggctaccctctcatccctggtcaatacgacccttttcaaggtcagcattctcaccacattggtgcaattctgttttggccaacagttgctatgactgtctatcagtatttaaaaattaaaatactgaactcggactaacactggtggtagaggtgattcctagcatttatttcctagtgttcctggaagacacaactaaggctgtttgtattctactgagacagaaagtggctaccgcttaataattgtcactgagagatgttatctcacagactgagggtggtagctggtgtctagggcaccatataacaccctgaagatcagataactgcttcggggatattgtagggaaaacagagccatggtaggtggctttggtgagatcacttgctctgatacctctactccttttaagttgcctcttccccatgtgagtaactagcatggtcaggcctaacatttcagaactcacctgaaacctgcttctcatcctttcactgatgtaacactttcactaaagctgaggagagaccttagtcataatgcgcaaggcaatcacatcttacctgtccccatttctattacctcagacccttcttgattagctatctttattttgtcacagttttgaaagttatagctggagagcctggtgcagattatacggaaccctttctggtgaggattcttaatagcatcggggaggggcttcctgctatctttgttcatagcacacggcagagttctggaatcagttcctacaagaacattaagcctgtcagatcaaaatgagccatcgggaactcattttactttaactacttctgcataagctcctgagtccaaacgcactcaaattgagaatttgggcctcaacatgggatcttagaagaattcagccatagccttagccaacgaacttagcaagacaatgttggataatgcttccaaatgcaggaaatgtaaaggaagtggactttttcttttaattcatttgctacttgatgctaagatagataggtaggtagatagataaagagataggcaggtgaatagattgatctctcaaagcaccaagtgtgaagagaacaagagaaggacatgcgttctattctaacacatcacagatgtaaagatggcttacttgagcagaataagtatgtctttctttttttgttaatgctactgtaatgtctcaaattatctctggaaaaaaatgtcagaggctggccttgaactgtacctccggaattattggcatgtactcccatgtctatttccctgaacaattttccatgggaatcaaatacttttttctgtgtgactgttcaggtctctgctcccttattagccttacagattaagaccattgttctaagaccatgtagacttaaagggcaggtttgtttgtttgtttgtttgtttgtttaaatttgatagctttatatcatgtactttatgggatgcatcatatttaagtcagtggagaaaaatgttacagtgatgaaagtcatcatacaagttttctaaagcaaatagcatgttgcttctcagttcactgtgacttctgcttcctattgctagctgggcagtacctgttatttgtcttgagtttcctattcaggaattcgtgcaaactccttagcaccaggcagagccagtcagatagaaggctgctatcctctgagtagctatttaaaaagccaccaagaactcagtaatggagtagatgggctacaccgagtggtttgtcatctgtctttgaggcatgaaacatttcatgtgtgtttttggcaaaggacaaatgattgctacaggttctgtgcccttgaccactgggcctgtgtccactcttttccaatgtcatggaaaccctgtgttttcctcccactaggcttgacctctgctgccctagttgcctctcagcaggtggctgcccaggcatctgcttctggaatgtttcctgcacagagaaggtaaatattcctgacacctggaattagttttctggcagagatgggctaatggtattcacggaagagaatataggctttgcagatgagaaacttggcacctgagtttcattttactgtaatgattgaacatgctatgacaagatgtttcacacggggctttgattccatgatcctcattctataaatgtgatgtacatctgtaaagaaatgtggggtttttttgttttatttttgttttgttttgttttgttttgttttaagtctaagataagggtaattgtccttaggttaagataaggccaagcctacacttttgttaacatattcatggggtagttcggtgttttagcatttgaccagaatgcctacagtcccaggttctagtctcagttctatcaaataaaatatcaggatacaaagcttttcattttattatacttaaaattaacattgcacatggagaaatgagttaccataatgctaaagggagcctttgtttctcttgtgttctaagttaccctgcaagctgttctgagaagaaaaataaattaaaaaaaaatcagattatcaatataaaattaacactccctaaaaatgtagcttatcactttgtgattcttcatttccccgggaatcgtagggaggaagcagaactctcaggctcactgtttttatgtagttcctgcccactgttgacagaaccggttgctaaggtgtgctcttcttttgcagagaataacagaatcggaagtgtccggtgccatgtgactggatcacatggggaagcgctttatatagacatcagttccatggtgttaatttgaaatgccttaatggcaggcaaaaaaccagtcatttcattttgtaaattacagattttatcacagagtaacaaatgttgctgtaattaaacttctgttttatatatatgtatatatatacgtatacatatctgtatatatacatatatatatatacatatatatatatatattctttacttttttgtaacagtaaccaggctcgcacacacagggtctgctgccaagttgcaaaccactcagtaaaggaaattaaaaaagaaaaaaaaaatgtatttgtcatgttgaaagtgttagccacaacaggctgcttacattcttttccttttaaattgtaaataaataatgttctgtatcagtgtgcctgaaccttgcatatccttcatctctctcccataaaacccctcagaaaggccaactgtgatgatgacacttggtacaatttagatgtctaattggtggctcctcttaaagatgcatcagtgtaaaaaatgtccccgtggtcactctttgtacttgtttattgtggaaataaatacttttggaaggcatggggttgccagaaccacaaaaactgtgttgtatatataatgtaaaaattaagatggggaaataatgagcatctgtgaataatgaggtgtcatttttttttgataatcttgaatggcagataacccaatagcctgcataccagagacatctgcgatctctctcttacttgaatagccctgcagtccttttttttttttccttttttttttctttaatgtttacaattatccagttttagaagagaaggattttaacgccattgcctggttacttgttttatgctgtaatctagtttattttatgtaaaatgtatattgaatgctttcctttttatacctgccttaaataatttggcaatcagaattaaaaaggttttgttttgttttttttttaataatggtttcttgtgtgtctgatgttacttctcgctggctgggagtgagtctaactttcagaggagaatttcttcacactatggacacgtaattcaacaatacacagatactaacttttcatacatgctaaaatgatataacaaccaaacgccgggttcaattctataaatatgggcagaactacatgactactctaaacatggacacatagcaccccaacagtatgctaaacatgtaatcttgtgtgtgtgtgtgtgtgtgtgtgtgtgtgtgtgttggtttatttcttaaaacttgttctctttatattatcccagctgtgctggatctcatagagatcctcctgcctctgtcccttcccaaatgttcatgttaaagccatttatcaccatacctggcctaaacatctaagtcttgtgacatatggacagtagacagaacatataaaatactcagctaagcaaggtgtggtggcaacacctttaatcccagcactcaggaggtggagacagatatatctctgtgagttcaaggccagcctagtctacatatttgagttatatgtagcagccccaaggtaacacagagaaaccctgtcttgggggggggggggaaacaatccaaaataaaaggattaaaaagtcagtgagttgtcactgacatatatagatatttcatgtccaatttcaccttttcttggctcatctttctgcctattgagccccccacactatcctaagctgggatgtatatcaatgaacaaaacagacagaaagtcccattctcatggagcttgtatctcccagtagacagtgcaaacatacaatgaagtccatgcacatagtaggttgtttgataagatgagtggggacacgttgaggatttgtgggagtttataaggctactcagtctgggacaatgtcactaacttgctgagaagggagttcatgtgaatttgaggggtggaggtgggtcaaagcaccacagtgaaatgggaaagctggtgcagaatccctccactggggattcactttggattggttaaggttttttctggtgctggggcccaagccaccccccgcctggcagatgctctgtccctgagctgcacaccccagccctggaacttgctcggcttcacaatctcatcccaatctggctctctatggctcccctccaatcaccaaagacaggtctaccagctcactaagaagtgctctcacgtgggtacctttgtttagctcgcctaccgcgtcccagaattctggcccagtagagaaatgctccctctgctttggcaagactaaagcagcatgctcctgttgagggctgagcaatattatgggttcctgaagactttccaacttacaattaggcacattttacaaataatatacaggaggccaggcttccctttcagtggtaaaatcctgaatgtacacgtatcacatgtcaggcttctcatcaatccagctcaggtggctgactagacagattataaatatgcacattagcccatacttaattctacttttgccgcgaatgggcgtgctgataaagatggagagatgcatgaccaaaaccacaagaccacgagagtagccttcctcctccctaggctttcgcttattcgtgactggtttacagtgatcacaaaatggaattttctttgtctcccccccccacccccttacggttatgattgctgtctatccccaggtcatgaagtgccgaaggccagagctcattgacattgtgtataccatttcactggctgagtctacattcagtactgaatggtaaattaaagattccccaaagacaagcatacttggctccattatattactatgatgaatctgtcattaatatgcttctaattgttttacttttatagacataaaatcagtccccttagtgactaataatagggtttattgattttactaaacattattcattccaggcctgcacatatcagcttgtccagaacataggcaaaaagcctgcagtgccagcagagtgcaaattaacttcgtggagaaatggggatggagagctgtttacagctgcagcccccattgaatgccgaatattaaaaacaaggctctatatagaaccatttatttctaggttagattctcagatggctttttcatggaaacttgccattgatgttcagcccaggtcattaacacatgcagagtgaaaagactggccttttccattcgcactggctctgaccccgacttcaagcggttgcagcccaaggctctctgaatgacctgaatgaatagctctgattgagaccgggatgaaacagccgtttaatgataattactggtcagtccagtctctctctgactctgaaaaagaaacaagacaggcaaagccatttatgattgtttgtgtcactaaccacagtcattttctcccctcttcccacagccctctgagtcataaatgctgttttctctcagttaacttaccggagagaaaacaaagtgaggccctgcaagctgaccattagccaggcctcagccatgaattcccttttagttctgtaaacaaaccctatgtaaagcctggggtggttgtcggcttcaacactgctgacttttgggagccagtagcgttttgggagactggcctgtgtgctctggtctgttcaacactacctggaacggggcagaagcaacctaccccacaaggtatcaccaactggcagagggcatttagcatccctgcccagcccctctgcacagtaaactcctgagttttctttagaagtatttagaaaacaagaaaactgactggacagcggtggtgtgcacctttaagcccagcacacaggcaaactgaactctgagttaaaagaaagatagtcagggagggcaaagagatgcaaaacaaccatggtgcaatgaaggggaagggccctgccccggaatattcagttgtggggatggaggataggggaaaactttaaaaagtcccagagacctgggatgtgaggctcctggggcacaatgaagactgccttagctgaactggtcaacagaggggagatagaaactcaagagaccacctgcagtaagtagatagacatggcccccatttgaggcatgtggtcatcaacatttttgacccagaattgtttctacctaaaagaaatgcagggactaaaatggagcagagattgaaggaaaggccatccagtagccagcccaatttgggatccattccatgggtgggcaccaaaccctgacaccgatgctatgttgtgcttgcaaacaggagctgtcctctgagaggctcttccaccagctgactgagacagatgcagatacttatagccaaacattgcactgaggtcagggaccgttagagttaggggaaggattgaaggacctgaaggggatggcaaccccataggaagaccaacagtatcaactaatcctgacttctgggagctcccagagactaagccaccaaccaaagagcatacatgggctagtccgtggcccctggcacatatgtagcaatggattgccttgtctggcctcagtggaagaggttatacttaatcctatagagacttgatgtcccagggaatgagaatgcaaaggaggatagtgaggtaagagtgggtgggtgggtgaaggagcaccttctcagaggcagtggtggaatggggtgaactcttggagggggggacctggacgaggggcaacatttggaatataaataaataaaaccaccccccccacacacacacacacacaaataaacaaaaatactgaatgggagatacttctaaacttttacataaggatcagtactgttgttacagttaaaaatcaatataatctaaaaaccatgcctgtggctaaattcactttagagtccatcaatttacaatattattttgtattgatcttccagtataatatctcctagcatgaaggttaataaattgggaaaataagtaattcttaaatgaattactggaatttaacttgaacttcttcccatgaaaaaaaaattcacttcatccacaaaagtaagctttgagagatattcagacatagtgtacactttggtgtcttagtctgttttatgttgttgatataatgccataagctaaggtagtttctaaagtttgtttggcctatatttatttgatgtttgaagtcctccacaatggaaatgtatcttgggaggaccttcttgctgagtttttacatggtggagagagagaggtaaaggacaagacttatatcagaaatccattcctaaagaaacccactcccatgaccattaacccatctcagaaatccattcctaaagaaacccactcccgtgaccatcaacctatctctgtggcacaacccacctttaaggtctgtctctcagtctactctgttggggattaaactttagaaaacattcaaaccacaacacaaaagtaatttgccaagcccttgctatgtaatggtcagagttcataacatccacattctactgcttcagaaaacacaaactctctagagaattatagccaaatctttccattgctaatccttttctttcagggagtctgatgaagaaaactcagtctgcttttccagtttttaatgaggcagagtctatgtcagagccaagcctcaatccctgttaaactccacactcaggcccagaactcctcaggagccctggggagaggggtgtacttggagcattgcagcaatggttactgggagatctgtgtttgccctcactttcacgatgtgggatgacacggcatggcatgaggtggcaggcaatccactctgtgatctgataactaaaagcctagagtgctaaagttggacttagggctctgaggccaagagggagagctgaggggttagagtctggtcaactatcatagggtccaacactggtcatcgctacatcctgacaaagggtctcaactttgtacttaagtatttccaaacgatgtcattcttcaggtcccggaggacttgtaagttggaagaggaggatgttgaaaccataactttaaacttatttcctgtaaccagatcctcctccggtacatgctgtatgcaccaagggaagtaagcaatttgaaacgttgatttgtacaatgtaaatgtttaaactggaatttcctaaccttgagttggaaaagcttttatactttattatgactaaaacctcaaaaaaaaaaaaaaagctaagaccttcctccctttccactcctctctccccctctttctccctttctccccctttttctaaacatggcatatttatgtctgcacatgtgtgggcctacatgtgtgtaacagtttatgtgcacatgtgtgcacgtggatctgaggcagcctaacattgaaaggcagaatcttccaccaacactgcacttcctctctgaggtaggctcttgcaatcaatctcagagcaccagtttgctctggaaaccctgattctaactcccaagtctggaattgtagccaggtcaccatgtccacccagcatttctgtgagtccaagatatataaattctggtcctcttgtttggccagtcctttaaaaattgagtggtccctctagtcccgttcttggtcaatgaaaagtctttgattcaaatgaaaaatttggaggcagcaatatgctaattaaaaagattcttcctaataatggtttcaaaggctggcatcatccagtccctattcgatcactaaagacagtagtaggtcaggaacaaaaggaagtcccttctcctgcacctccccactgggagaatgagtggagtcatcagtataacaggaatggctttcagcatgactgccacagagattgagcttgggtagctgcctgaacagttggacactttcttctgcctataaccaatgctatcactcagccaatcctctcctacacggagagctattttctccccaagtataaagttggaagcttggtgagctccaacacgctctgcacacagctggctctactcctctgaaagacattgcttagtctatgcttaaggcagttctgaagcacatacccagaggcatcaacatccaaggaaaacactcttgacttcctgtccgtctcttaggaaggaagaagaaaactttcccgatcactgctggaatcaaatgagtcacatatccatccttaaacggtcactgatgagaagatgattgctaagtcaccctcctcaggctaaggaggatgtgactgtgccctggcttatgggatagatggactatggcccatagctaaggttgcattaggatgagagaagagaggagtcaacgtttggttgctttacctagaacttgcttgaagacccgaggaattagctgaatctctgtagcccactccggttcaagatatgactctataggggatggagcaattgatagcattccagggggacttacagagagtttttgttgattttcctccatatgcaagagctgaggctgccaaataaaagtgaaggggtcatgcacaaacctgtcacatttggttttcttcttatttcatgtcaaagtaaattaggactttatttgtgagaacagagatgctaatccctactaccactccctaacattcacacagacacacaccattttacatgcagccctacctcctgcctataatgatacctcagaacttacaatttataggaaagaagagggatatcccttccacccaaatcaatcagtctacatcagacactaaaaaggaacttggagaaaaaaaaaaaaaaagacaggagaggaggagatggatggatgttaaacagagcatggattggagccctgtaaacccaaaatgagaagagcacggacagattagtcactagcaggaagaaaattgcactgtatgaggaacaacgaagattccttgacaggagaaatttgaggcttagtcatgggatgatcttggagctactgaaggctttaggtcaagaaagatccttgtctaaatctcagaaagcaatgtgctattaatggaagacttgtgaggaggaagtcctagatctagttgccaaaggagtctgccctttctgctaccacactgtgcccacttgtagagagcagagtggaggctctcaaatttagaagaacactaaggagtagccacagttccttgcccttctctagtcttgcctggatttcctacacaatggactaacacttctactaaatggtcacccctgtggaggggttgggggactctgaccaggagtgatgggctagggccccacctaccatattatatactcagaatctttgggtggaaaaaaatcataagaagcatgctatgataaagaccctgatcaaaagtaattttgagggaagaaagggtgtatttggctcatatggttacagttcattgagggaaaccaaggcaagacctctagagaaggagctgaagacgtcaagaactgaagcagaggccatggaggagcactgctcattggcttgctgcacttgacttgttccatttgctcacttatacctcctaggaccatgggccagagatggcactgcccacacagtgggctggaccttcccacatcaaagagattgaagttaataacccacaggcttttctgcaggccaatcaaatggaggcacttcttaattgacattccctcttcttaaattactctaatttgtgtcaagttaacaaagacctaaccgtcacaatggaagtttggaaatggatgatgccatgagacattctaactagaacaagtttcctaagctccctggattcttagagatataaagtctagacatcctcctgacatttaggataggcaatgggcagccttctcctctgggagaatgtggatgtttctgaagagtcaagcaaagtcaaatctgaagacctactgtgcagacgagttcctactttggaactgtggtggaaacttaactctggatcccccaaaacccctaggtgcctgtacctgtgcaatcccttcaatgataagacagaaacatatcaaataaggattgagggatagagcacagttagtagagggtttgactagcaagtataagaccctaggtttagttttagttcctaacaccatccatactgagtgtggtattgcttgccggtaacagtagccctaaagaggtagattgtcagaggatcagaacaaaaattcaaagtcatcctcagatacacaccaacgaccctggggctgggggtgggggtgggcaggaagagagagagagagagagagagagagagaataaataaataaataaataaataaataaataaataaataaaagattggctttggcacagctttgtgacagattgtcttgtcttctcatcatgctgaaataggatatcaccaggtctctgacctgatattgctgtgagctcatttgttactgatcactaggaagtagcaaacatggctagctgctaattcttacaccttggtgcagtctgtcagacattcatgttcctgaagaaggctgagtcagaccctgactttgctgccactaaggaaattacctagggtggagccttcctccctagatcactctattgttcagctaatgtcacggttcctcttcatgatactgctacctgctgagaggcccctgggagctattccagagactatgccctatcctgcacgccatcacctgcagctggttccaggctccaaggatgaattggcgggaatgggcctccccctcctcctttataagcgcatttgccattaaacatttgagccttgatcagaaccttgtcttggctctatttctctctctttcagcctcagtttgcctcccaggtgaaacccagtttatgtgagccgctggctggttcgcaacatgttcccttctgaatgaggttcgactcagaggcaagtgaatgtcatacaaccacaccttatccagaatccaagatggtttcagctccacacttcccattgtagaactttgtgggcaacttacagagctagggacagtcccctgactcccgtgagtggggtgttctggagaacctgtagctaccttccaaggtctactagaagaagctgttttgtgtcatgcatggctggacacagatgaattggtgataaatattgatgtggcattctcttggaaggcgaagtagctaatctcatcacactaaatgggaacagttgtatgggctctgttgctccttctgcatgcttggcagggctcctagttatctttgtcccagcagtgccaccaagccttagtcaagcctttgcagatgtaagtaacaaagctgtggtaacataaacaaaatagacttacttcaagggcagaagggttctcaagtgatcaggagtaggtagtgagttcaagttcaaaggaggtagggcccaaaccagcctctcatgagtctgagagtccagtggatgggatgaacctgcttgcttggaggggtacagtgagaagaggcaccaggttgctaggttggctcctagtctaggctcctttggaccagtactattaacactggagtttaagtcttttggtggctggaagcagaaatccattcaaaccagcttgcttacaaatcaggattactgaaaggctctaagagtatctcataatatagaaggacaggaagggaattggcagacaagccatgtatctcaaaaaccttaaatctcagattatcacagcatcacacacgtctgtttctctgtggattttgttcctccggcagcctctgctgcaggctttcaacttccctacttctgtcatgggaagagccttgggggtagctctggagctcacactagctcactctgtaccatcatctaagaggcccagctttccacctacaccccaaattcccatgccaggtgtaatgggttcctgtcattggaataaccaaatgtggttgagcagacatgggaaatgttgacagcattatctagctaaggacagtc

SEQ ID NO: 814 - DNA, 4797 bp, Mus musculus
tgaccatctgaaccctgcccatattctcgactctgcagtgactattcatctctcctggaacaatgcttgccacatagaggcacctgacagaaagatactggataagaggatgacttccctaacagtgaggcagctttcattagcaactcttacgaaggggagggcatggggttgaccccctgtttacagtgccggcaccaccgccgccgattgccagcagtctcgcacctcagattccgccctcctactttcccccatcttcatccaatattgcagcaccagtcgaacagcttttggttcggactcggtccgtgggtgtcaatacgtgtgaagttggagtagtgacagagccagagtgtcttgggccctgtgaacctgggaccagtgtcaatttggaagggatcgtgtggcatgaaacagaagaaggtgtcctagtggtcaatgtcacatggaggaacaaaacctacgtggggaccctcctagactgcaccaagcacgactgggcccctccccggttttgcgaatcaccgacaagtgacctggaaatgcgagggggccggggcagagggaagagagcgaggtctgccgcggctgccccaggctccgaggtcagcttcaccgagtccagagggctgcagagcaagaacagagggggagccaatgggaaagggaggcgtggcagcctcaacgccagcggacgaaggacacccccaaactgtgctgcagaggacataaaagccagcccttcctcaaccaacaaaaggaagaacaagcccccaatggagttggatctgaactcgagctctgaggacagtaagcccgggaagcgagtgcgcacgaattccagaagcacgcctaccactcctcaggggaagccagagactacttttttggaccaaggctgctcctctccagtgttaattgattgtccccacccaaactgcaacaaaaaatataagcacataaacggcctgaggtaccaccaggcacatgcgcacttagacccggaaaacaaactagagttcgagccggatagcgaggacaagatctcagactgtgaggaagccttgagcaacgtggccctcgaatgcaacgagtcaagcacaagtgtgtcatcatacgatcagacgaaagcacctgggtcccccggggctgggaacccccctgggacacccaagggaaagagagagcacgtgagcaatggcccaggtcctattataggttcgaaaactggcaagaattctggcaagaagaggggccttaacaacgaactgaacaaccttccggtcatctccaacatgacggccgctttagacatttgttcagccacagacagcaatctaacggcggaaatgcccaaattggaagcggaaggactgattgacaagaaaagtttgggggataaagaaaagggcaaaaaagcaaacaattgcaaaatggacaaaaacctctccaaactgaaaagcgcccgccccattgcccccgcccctgcccctacgcccccacagctgattgctataccgactgcagccttcacatccaccaccacagggaccatacctggactgccctccctcacgaccactgtggtccaggctacaccaaagagccctccattgaaacctattcaaccaaagcccacaattatgggggagcccatcaccgtgaacccagctctggtgtcactcaaagacagaaagaaaaaggagaagcgaaagctcaaggacaaagaagggaaagagactggaggtcccaaaatggatgctaagctggggaagctggaggaagccaaggcggctagcaaggatttgtctgggcattttttaaaggaccatctcggtaagagcgaagggctggctaatggattgtcagagtctcaggagagccgcatggccagcatcaaagccgaggccgataaggtttacacattcacggacaatgcccccagcccttccatcgggagtgcctcacgcatggaatgcagtaccttggtgaatgggcaagcacccatggcaccactgcatgtattgacccagaatggggctgagagcgcagcagctaagaccagcagtccagcctattcggacatatcagatgctgcagatgatggcggttctgacagcaggtcagagggcatgaggtcaaaggccagttccccatcggataccttttctaacaaagacggtgttgtgaaagggcatccttcaacttcagcacagccatctcagctgaaagagtcccattctccctattaccatggctatgagccttactattctccgagttacatgcaccctggacaggttggtgccccggcagctgggaatggtgggagcacacagggcatgaagatcaagaaggagtcagaggaagatgcggagaagaaagacaaggcggaacagttggagtccaagaaagtagaccatacttctgcacccctgcagcctcagcaccagtcagtcatcacccagagacaccctgccctggctcagtcactttattacggccagtatgcctacgggctctatatggaccagaaatctctgatggctaccagccctgcctacagacagcagtatgagaagtactatgaggaccagagactggcagagcagaaaatggcccagagtgggagaggagactgtgaaagaaaggctgaactccccttgaaagaactgggcaaggaagacaataagcagaaaaacatgccatcagccactatctcaaaagctccctctaccccggagcctaacaaaaaccattctaaactagggccatcagtgcctaataaaactgaggagacaggtaaatcacagcttctctccagtcaccagcagcagcttcaggccgacagcttcaaagctaagcagatggaaaaccaccagcttattaaggaggctgtagaaatgaagtctgtcatggactctatgaagcagacaggtgtagacccaacctcgagatttaaacaagatccagagtcaaggacatggcaccattatgtataccagcccaagtacctggaccaacaaaagccagaagaacttgacagagaaaagaaattgaaagaggacagtccaaggaagactcctaacaaagagagtggcgtgtccagtctccccgtgtcattaacaaacatcaaagaggagcccaaagagggcaagcgtcctgattcccagtcggtggaggagaacaagctaaagaatgatgatcggaagacaccggtgaactggaaggactctcgggggacacgagtggccgtgtcctcacccatgagtcagcaccagtcctacatacaatacttgcatgcttatccttacccacagatgtatgaccccagccaccctgcataccgggctgtctctcctgtcttaatgcacagttaccctggggcctatctctctccaggatttcattatcctgtttatggaaagatgtctgggagagaagaggcagagaaagtcaatactagtcccagcatcaacacaaaaacagccagcgaagccaaagccctggacctactccaacatcacgccaaccaataccgcagcaagtcccctgctcctgtggagaaggcttccacggagcgagaacgggaagcagagcgggaacgggatcgccactcccccttcagccagcggcacctgcacacacaccaccacacccatgttggcatgggctaccctctcatccctggtcaatacgacccttttcaaggcttgacctctgctgccctagttgcctctcagcaggtggctgcccaggcatctgcttctggaatgtttcctgcacagagaagagaataacagaatcggaagtgtccggtgccatgtgactggatcacatggggaagcgctttatatagacatcagttccatggtgttaatttgaaatgccttaatggcaggcaaaaaaccagtcatttcattttgtaaattacagattttatcacagagtaacaaatgttgctgtaattaaacttctgttttatatatatgtatatatatacgtatacatatctgtatatatacatatatatatatacatatatatatatatattctttacttttttgtaacagtaaccaggctcgcacacacagggtctgctgccaagttgcaaaccactcagtaaaggaaattaaaaaagaaaaaaaaaatgtatttgtcatgttgaaagtgttagccacaacaggctgcttacattcttttccttttaaattgtaaataaataatgttctgtatcagtgtgcctgaaccttgcatatccttcatctctctcccataaaacccctcagaaaggccaactgtgatgatgacacttggtacaatttagatgtctaattggtggctcctcttaaagatgcatcagtgtaaaaaatgtccccgtggtcactctttgtacttgtttattgtggaaataaatacttttggaaggcatggggttgccagaaccacaaaaactgtgttgtatatataatgtaaaaattaagatggggaaataatgagcatctgtgaataatgaggtgtcatttttttttgataatcttgaatggcagataacccaatagcctgcataccagagacatctgcgatctctctcttacttgaatagccctgcagtccttttttttttttccttttttttttctttaatgtttacaattatccagttttagaagagaaggattttaacgccattgcctggttacttgttttatgctgtaatctagtttattttatgtaaaatgtatattgaatgctttcctttttatacctgccttaaataatttggcaatca

SEQ ID NO: 815 - protein, 1075 aa, Mus musculus
MRGGRGRGKRARSAAAAPGSEVSFTESRGLQSKNRGGANGKGRRGSLNASGRRTPPNCAAEDIKDSSTNKRKNKPPMELDLNSSSEDSKPGKRVRTNSRSTPTTPQGKPETTFLDQGCSSPVLIDCPHPNCNKKYKHINGLRYHQAHAHLDPENKLEFEPDSEDKISDCEEALSNVECNESSTSVSSYDQTKAPGSPGAGNPPGTPKGKREHVSNGPGPIIGSKTGKNSGKKRQNELNNLPVISNMTAALDICSATDSNLTAEMPKLEAEGLIDKKSLGDKEKGKKANNCKMDKNLSKLKSARPIAPAPAPTPPQLIAIPTAAFTSTTTGTIPGLPSLTTTVVQATPKSPPLKPIQPKPTIMGEPITVNPALVSLKDRKKKEKRKLKDKEGKETGGPKMDAKLGKLEEAKAASKDLSGHFLKDHLGKSEGLANGLSESQESRMASIKAEADKVYTFTDNAPSPSIGSASRMECSTLVNGQAPMAPLHVLTQNGAESAAAKTSSPAYSDISDAADDGGSDSRSEGMRSKASSPSDTFSNKDGVVKGHPSTSAQPSQLKESHSPYYHGYEPYYSPSYMHPGQVGAPAAGNGGSTQGMKIKKESEEDAEKKDKAEQLESKKVDHTSAPLQPQHQSVITQRHPAQSLYYGQYAYGMDQKSLMATSPAYRQQYEKYYEDQRLAEQKMAQSGRGDCERKAELPLKELGKEDNKQKNMPSATISKAPSTPEPNKNHSKLGPSVPNKTEETGKSQLLSSHQQQLQADSFKAKQMENHQLIKEAVEMKSVMDSMKQTGVDPTSRFKQDPESRTWHHYVYQPKYLDQQKPEELDREKKLKEDSPRKTPNKESGVSSLPVSLTNIKEEPKEGKRPDSQSVEENKLKNDDRKTPVNWKDSRGTRVAVSSPMSQHQSYIQYLHAYPYPQMYDPSHPAYRAVSPVLMHSYPGAYLSPGFHYPVYGKMSGREEAEKVNTSPSINTKTASEAKALDLLQHHANQYRSKSPAPVEKASTEREREAERERDRHSPFSQRHLHTHHHTHVGMGYPLIPGQYDPFQGLTSAALVASQQVAAQASASGMFPAQRRE

SEQ ID NO: 816 - DNA, 6068 bp, Mus musculus
aggtatacaggctgagagctcctttggctccactccccctgtgcgtgtgttgtgtttcagttctgattccactgttccagaacaagcttggtgtgtgtatgtgtgcaccggggggatttctgtgttttggttttttttttgctttattttttttatttttataaaaaaatacacgggacggtctgtgacatttgctggtccatctttaataaaaaaaaaattgaagaaattataatttccaaaataaagaggctacaaccaaacacactcaatgcagttagaaggaaaaggtcaactcgctcccatacagaccgagaagctggacctcgagtgaaggaagtgagatccctggacacatttttgggggcaggaaaaagaagaggaaaattgcaaggaaaaaaaaatttttttttctttacgagaaaacccagaggagctaaacgaatgtcccctcatccctcaaagaaagttcatcgggtttttaatctcgagagctcatcttcaggatgtccgtgaacgtttcgactgcaggaaaaggtgtggatccaaatacagttgatacttatgacagtggcgatgattgggaaatcggggttggaaatttaatcattgatttggacgccgatttggaaaaggacagacaaaaatttgagatgaataattccaccaacaccactaccaacaccactaaggattgtggaggtccggcctccaatgggacctgttctacctcagccttagctgatggcctaaaatttgcttctgttcagccctccgctccccaggggaattcacacaaagaaaccagcaaatcaaaagtgaaaagggctaaaacttctaaggatgctaataaatctctgccttctgctgccttgtatggaattcccgagatcagcagcactggcaagaggcaggaagtccaagggcgccctggagaggctactggcatgaattcagcgctgggtcaaagtgtgagcggcggcggcagcagcaacccaaacagcaacggtaccagcaccgggacctcggctgccaccgcgggggcaggctcctgtgggaaaagcaaggaagagaagccagggaaaagccacagcagccgaggcgccaagcgggataaggatgctgcgagatcccggaaagagaaacacgacctgctgcagggccaccagaatggcggcggaggccaggccccctccggtggtcacctctatggctttgggaccaagagcaatggaagtggcgcgagcccctttcactgtgggggcgctgggagtggcagcgttggggctgcaggggaagttagcaaaactgctccggattcaacgctcatgggaaactctatgctggtcaagaaggaagaggaggaggaggagagccacaggcgaatcaagaaactgaaaactgagaaggttgaccccctgtttacagtgccggcaccaccgccgccgattgccagcagtctcgcacctcagattccgccctcctactttcccccatcttcatccaatattgcagcaccagtcgaacagcttttggttcggactcggtccgtgggtgtcaatacgtgtgaagttggagtagtgacagagccagagtgtcttgggccctgtgaacctgggaccagtgtcaatttggaagggatcgtgtggcatgaaacagaagaaggtgtcctagtggtcaatgtcacatggaggaacaaaacctacgtggggaccctcctagactgcaccaagcacgactgggcccctccccggttttgcgaatcaccgacaagtgacctggaaatgcgagggggccggggcagagggaagagagcgaggtctgccgcggctgccccaggctccgaggtcagcttcaccgagtccagagggctgcagagcaagaacagagggggagccaatgggaaagggaggcgtggcagcctcaacgccagcggacgaaggacacccccaaactgtgctgcagaggacataaaagccagcccttcctcaaccaacaaaaggaagaacaagcccccaatggagttggatctgaactcgagctctgaggacagtaagcccgggaagcgagtgcgcacgaattccagaagcacgcctaccactcctcaggggaagccagagactacttttttggaccaaggctgctcctctccagtgttaattgattgtccccacccaaactgcaacaaaaaatataagcacataaacggcctgaggtaccaccaggcacatgcgcacttagacccggaaaacaaactagagttcgagccggatagcgaggacaagatctcagactgtgaggaagccttgagcaacgtggccctcgaatgcaacgagtcaagcacaagtgtgtcatcatacgatcagacgaaagcacctgggtcccccggggctgggaacccccctgggacacccaagggaaagagagagcacgtgagcaatggcccaggtcctattataggttcgaaaactggcaagaattctggcaagaagaggggccttaacaacgaactgaacaaccttccggtcatctccaacatgacggccgctttagacatttgttcagccacagacagcaatctaacggcggaaatgcccaaattggaagcggaaggactgattgacaagaaaagtttgggggataaagaaaagggcaaaaaagcaaacaattgcaaaatggacaaaaacctctccaaactgaaaagcgcccgccccattgcccccgcccctgcccctacgcccccacagctgattgctataccgactgcagccttcacatccaccaccacagggaccatacctggactgccctccctcacgaccactgtggtccaggctacaccaaagagccctccattgaaacctattcaaccaaagcccacaattatgggggagcccatcaccgtgaacccagctctggtgtcactcaaagacagaaagaaaaaggagaagcgaaagctcaaggacaaagaagggaaagagactggaggtcccaaaatggatgctaagctggggaagctggaggaagccaaggcggctagcaaggatttgtctgggcattttttaaaggaccatctcggtaagagcgaagggctggctaatggattgtcagagtctcaggagagccgcatggccagcatcaaagccgaggccgataaggtttacacattcacggacaatgcccccagcccttccatcgggagtgcctcacgcatggaatgcagtaccttggtgaatgggcaagcacccatggcaccactgcatgtattgacccagaatggggctgagagcgcagcagctaagaccagcagtccagcctattcggacatatcagatgctgcagatgatggcggttctgacagcaggtcagagggcatgaggtcaaaggccagttccccatcggataccttttctaacaaagacggtgttgtgaaagggcatccttcaacttcagcacagccatctcagctgaaagagtcccattctccctattaccatggctatgagccttactattctccgagttacatgcaccctggacaggttggtgccccggcagctgggaatggtgggagcacacagggcatgaagatcaagaaggagtcagaggaagatgcggagaagaaagacaaggcggaacagttggagtccaagaaagtagaccatacttctgcacccctgcagcctcagcaccagtcagtcatcacccagagacaccctgccctggctcagtcactttattacggccagtatgcctacgggctctatatggaccagaaatctctgatggctaccagccctgcctacagacagcagtatgagaagtactatgaggaccagagactggcagagcagaaaatggcccagagtgggagaggagactgtgaaagaaaggctgaactccccttgaaagaactgggcaaggaagacaataagcagaaaaacatgccatcagccactatctcaaaagctccctctaccccggagcctaacaaaaaccattctaaactagggccatcagtgcctaataaaactgaggagacaggtaaatcacagcttctctccagtcaccagcagcagcttcaggccgacagcttcaaagctaagcagatggaaaaccaccagcttattaaggaggctgtagaaatgaagtctgtcatggactctatgaagcagacaggtgtagacccaacctcgagatttaaacaagatccagagtcaaggacatggcaccattatgtataccagcccaagtacctggaccaacaaaagccagaagaacttgacagagaaaagaaattgaaagaggacagtccaaggaagactcctaacaaagagagtggcgtgtccagtctccccgtgtcattaacaaacatcaaagaggagcccaaagagggcaagcgtcctgattcccagtcggtggaggagaacaagctaaagaatgatgatcggaagacaccggtgaactggaaggactctcgggggacacgagtggccgtgtcctcacccatgagtcagcaccagtcctacatacaatacttgcatgcttatccttacccacagatgtatgaccccagccaccctgcataccgggctgtctctcctgtcttaatgcacagttaccctggggcctatctctctccaggatttcattatcctgtttatggaaagatgtctgggagagaagaggcagagaaagtcaatactagtcccagcatcaacacaaaaacagccagcgaagccaaagccctggacctactccaacatcacgccaaccaataccgcagcaagtcccctgctcctgtggagaaggcttccacggagcgagaacgggaagcagagcgggaacgggatcgccactcccccttcagccagcggcacctgcacacacaccaccacacccatgttggcatgggctaccctctcatccctggtcaatacgacccttttcaaggcttgacctctgctgccctagttgcctctcagcaggtggctgcccaggcatctgcttctggaatgtttcctgcacagagaagagaataacagaatcggaagtgtccggtgccatgtgactggatcacatggggaagcgctttatatagacatcagttccatggtgttaatttgaaatgccttaatggcaggcaaaaaaccagtcatttcattttgtaaattacagattttatcacagagtaacaaatgttgctgtaattaaacttctgttttatatatatgtatatatatacgtatacatatctgtatatatacatatatatatatacatatatatatatatattctttacttttttgtaacagtaaccaggctcgcacacacagggtctgctgccaagttgcaaaccactcagtaaaggaaattaaaaaagaaaaaaaaaatgtatttgtcatgttgaaagtgttagccacaacaggctgcttacattcttttccttttaaattgtaaataaataatgttctgtatcagtgtgcctgaaccttgcatatccttcatctctctcccataaaacccctcagaaaggccaactgtgatgatgacacttggtacaatttagatgtctaattggtggctcctcttaaagatgcatcagtgtaaaaaatgtccccgtggtcactctttgtacttgtttattgtggaaataaatacttttggaaggcatggggttgccagaaccacaaaaactgtgttgtatatataatgtaaaaattaagatggggaaataatgagcatctgtgaataatgaggtgtcatttttttttgataatcttgaatggcagataacccaatagcctgcataccagagacatctgcgatctctctcttacttgaatagccctgcagtccttttttttttttccttttttttttctttaatgtttacaattatccagttttagaagagaaggattttaacgccattgcctggttacttgttttatgctgtaatctagtttattttatgtaaaatgtatattgaatgctttcctttttatacctgccttaaataatttggcaatcagaattaaaaaggttttgttttgtttttttttt

SEQ ID NO: 817 - protein, 1495 aa, Mus musculus
MSVNVSTAGKGVDPNTVDTYDSGDDWEIGVGNLIIDLDADLEKDRQKFEMNNSTNTTTNTTKDCGGPNGTCSTSADGLKFASVQPSAPQGNSHKETSKSKVKRAKTSKDANKSLPSAALYGIPEISSTGKRQEVQGRPGEATGMNSALGQSVSGGGSSNPNSNGTSTGTSAATAGAGSCGKSKEEKPGKSHSSRGAKRDKDAARSRKEKHDLLQGHQNGGGGQAPSGGHLYGFGTKSNGSGDFHCGGAGSGSVGAAGEVSKTAPDSTLMGNSMLVKKEEEEEESHRRIKKLKTEKVDPLFTVPAPPPPIASSLAPQIPPSYFPPSSSNIAAPVEQLLVRTRSVGVNTCEVGVVTEPECLGPCEPGTSVNLEGIVWHETEEGVLVVNVTWRNKTYVGTLLDCTKHDWAPPRFCESPTSDLEMRGGRGRGKRARSAAAAPGSEVSFTESRGLQSKNRGGANGKGRRGSLNASGRRTPPNCAAEDIKDSSTNKRKNKPPMELDLNSSSEDSKPGKRVRTNSRSTPTTPQGKPETTFLDQGCSSPVLIDCPHPNCNKKYKHINGLRYHQAHAHLDPENKLEFEPDSEDKISDCEEALSNVECNESSTSVSSYDQTKAPGSPGAGNPPGTPKGKREHVSNGPGPIIGSKTGKNSGKKRQNELNNLPVISNMTAALDICSATDSNLTAEMPKLEAEGLIDKKSLGDKEKGKKANNCKMDKNLSKLKSARPIAPAPAPTPPQLIAIPTAAFTSTTTGTIPGLPSLTTTVVQATPKSPPLKPIQPKPTIMGEPITVNPALVSLKDRKKKEKRKLKDKEGKETGGPKMDAKLGKLEEAKAASKDLSGHFLKDHLGKSEGLANGLSESQESRMASIKAEADKVYTFTDNAPSPSIGSASRMECSTLVNGQAPMAPLHVLTQNGAESAAAKTSSPAYSDISDAADDGGSDSRSEGMRSKASSPSDTFSNKDGVVKGHPSTSAQPSQLKESHSPYYHGYEPYYSPSYMHPGQVGAPAAGNGGSTQGMKIKKESEEDAEKKDKAEQLESKKVDHTSAPLQPQHQSVITQRHPAQSLYYGQYAYGMDQKSLMATSPAYRQQYEKYYEDQRLAEQKMAQSGRGDCERKAELPLKELGKEDNKQKNMPSATISKAPSTPEPNKNHSKLGPSVPNKTEETGKSQLLSSHQQQLQADSFKAKQMENHQLIKEAVEMKSVMDSMKQTGVDPTSRFKQDPESRTWHHYVYQPKYLDQQKPEELDREKKLKEDSPRKTPNKESGVSSLPVSLTNIKEEPKEGKRPDSQSVEENKLKNDDRKTPVNWKDSRGTRVAVSSPMSQHQSYIQYLHAYPYPQMYDPSHPAYRAVSPVLMHSYPGAYLSPGFHYPVYGKMSGREEAEKVNTSPSINTKTASEAKALDLLQHHANQYRSKSPAPVEKASTEREREAERERDRHSPFSQRHLHTHHHTHVGMGYPLIPGQYDPFQGLTSAALVASQQVAAQASASGMFPAQRRE

SEQ ID NO: 818 - DNA, 6108 bp, Mus musculus
ccctcccctgcccctctcctctccctctctctcaacaccctattattctgaatgcttgttaagaggaaaaacacccttcggtgctcgggttgtgaacgtgaagcatctctcagctgcacagtgacacattttttttaaggagaaaaggactccagagctttttgccaaatgggggatgggggagtggaatgatgttactgagtgattattttggctgagatgtgttacttggtttcttcctttttgatcatttggtgtttaagtaaaatgaggcacagggctgtgtgcctagtggactgagaaatgcttttttgatttgccggcctaattaaaaaatgataaaggatttaaaggagaagctggacctcgagtgaaggaagtgagatccctggacacatttttgggggcaggaaaaagaagaggaaaattgcaaggaaaaaaaaatttttttttctttacgagaaaacccagaggagctaaacgaatgtcccctcatccctcaaagaaagttcatcgggtttttaatctcgagagctcatcttcaggatgtccgtgaacgtttcgactgcaggaaaaggtgtggatccaaatacagttgatacttatgacagtggcgatgattgggaaatcggggttggaaatttaatcattgatttggacgccgatttggaaaaggacagacaaaaatttgagatgaataattccaccaacaccactaccaacaccactaaggattgtggaggtccggcctccaatgggacctgttctacctcagccttagctgatggcctaaaatttgcttctgttcagccctccgctccccaggggaattcacacaaagaaaccagcaaatcaaaagtgaaaagggctaaaacttctaaggatgctaataaatctctgccttctgctgccttgtatggaattcccgagatcagcagcactggcaagaggcaggaagtccaagggcgccctggagaggctactggcatgaattcagcgctgggtcaaagtgtgagcggcggcggcagcagcaacccaaacagcaacggtaccagcaccgggacctcggctgccaccgcgggggcaggctcctgtgggaaaagcaaggaagagaagccagggaaaagccacagcagccgaggcgccaagcgggataaggatgctgcgagatcccggaaagagaaacacgacctgctgcagggccaccagaatggcggcggaggccaggccccctccggtggtcacctctatggctttgggaccaagagcaatggaagtggcgcgagcccctttcactgtgggggcgctgggagtggcagcgttggggctgcaggggaagttagcaaaactgctccggattcaacgctcatgggaaactctatgctggtcaagaaggaagaggaggaggaggagagccacaggcgaatcaagaaactgaaaactgagaaggttgaccccctgtttacagtgccggcaccaccgccgccgattgccagcagtctcgcacctcagattccgccctcctactttcccccatcttcatccaatattgcagcaccagtcgaacagcttttggttcggactcggtccgtgggtgtcaatacgtgtgaagttggagtagtgacagagccagagtgtcttgggccctgtgaacctgggaccagtgtcaatttggaagggatcgtgtggcatgaaacagaagaaggtgtcctagtggtcaatgtcacatggaggaacaaaacctacgtggggaccctcctagactgcaccaagcacgactgggcccctccccggttttgcgaatcaccgacaagtgacctggaaatgcgagggggccggggcagagggaagagagcgaggtctgccgcggctgccccaggctccgaggtcagcttcaccgagtccagagggctgcagagcaagaacagagggggagccaatgggaaagggaggcgtggcagcctcaacgccagcggacgaaggacacccccaaactgtgctgcagaggacataaaagccagcccttcctcaaccaacaaaaggaagaacaagcccccaatggagttggatctgaactcgagctctgaggacagtaagcccgggaagcgagtgcgcacgaattccagaagcacgcctaccactcctcaggggaagccagagactacttttttggaccaaggctgctcctctccagtgttaattgattgtccccacccaaactgcaacaaaaaatataagcacataaacggcctgaggtaccaccaggcacatgcgcacttagacccggaaaacaaactagagttcgagccggatagcgaggacaagatctcagactgtgaggaagccttgagcaacgtggccctcgaatgcaacgagtcaagcacaagtgtgtcatcatacgatcagacgaaagcacctgggtcccccggggctgggaacccccctgggacacccaagggaaagagagagcacgtgagcaatggcccaggtcctattataggttcgaaaactggcaagaattctggcaagaagaggggccttaacaacgaactgaacaaccttccggtcatctccaacatgacggccgctttagacatttgttcagccacagacagcaatctaacggcggaaatgcccaaattggaagcggaaggactgattgacaagaaaagtttgggggataaagaaaagggcaaaaaagcaaacaattgcaaaatggacaaaaacctctccaaactgaaaagcgcccgccccattgcccccgcccctgcccctacgcccccacagctgattgctataccgactgcagccttcacatccaccaccacagggaccatacctggactgccctccctcacgaccactgtggtccaggctacaccaaagagccctccattgaaacctattcaaccaaagcccacaattatgggggagcccatcaccgtgaacccagctctggtgtcactcaaagacagaaagaaaaaggagaagcgaaagctcaaggacaaagaagggaaagagactggaggtcccaaaatggatgctaagctggggaagctggaggaagccaaggcggctagcaaggatttgtctgggcattttttaaaggaccatctcggtaagagcgaagggctggctaatggattgtcagagtctcaggagagccgcatggccagcatcaaagccgaggccgataaggtttacacattcacggacaatgcccccagcccttccatcgggagtgcctcacgcatggaatgcagtaccttggtgaatgggcaagcacccatggcaccactgcatgtattgacccagaatggggctgagagcgcagcagctaagaccagcagtccagcctattcggacatatcagatgctgcagatgatggcggttctgacagcaggtcagagggcatgaggtcaaaggccagttccccatcggataccttttctaacaaagacggtgttgtgaaagggcatccttcaacttcagcacagccatctcagctgaaagagtcccattctccctattaccatggctatgagccttactattctccgagttacatgcaccctggacaggttggtgccccggcagctgggaatggtgggagcacacagggcatgaagatcaagaaggagtcagaggaagatgcggagaagaaagacaaggcggaacagttggagtccaagaaagtagaccatacttctgcacccctgcagcctcagcaccagtcagtcatcacccagagacaccctgccctggctcagtcactttattacggccagtatgcctacgggctctatatggaccagaaatctctgatggctaccagccctgcctacagacagcagtatgagaagtactatgaggaccagagactggcagagcagaaaatggcccagagtgggagaggagactgtgaaagaaaggctgaactccccttgaaagaactgggcaaggaagacaataagcagaaaaacatgccatcagccactatctcaaaagctccctctaccccggagcctaacaaaaaccattctaaactagggccatcagtgcctaataaaactgaggagacaggtaaatcacagcttctctccagtcaccagcagcagcttcaggccgacagcttcaaagctaagcagatggaaaaccaccagcttattaaggaggctgtagaaatgaagtctgtcatggactctatgaagcagacaggtgtagacccaacctcgagatttaaacaagatccagagtcaaggacatggcaccattatgtataccagcccaagtacctggaccaacaaaagccagaagaacttgacagagaaaagaaattgaaagaggacagtccaaggaagactcctaacaaagagagtggcgtgtccagtctccccgtgtcattaacaaacatcaaagaggagcccaaagagggcaagcgtcctgattcccagtcggtggaggagaacaagctaaagaatgatgatcggaagacaccggtgaactggaaggactctcgggggacacgagtggccgtgtcctcacccatgagtcagcaccagtcctacatacaatacttgcatgcttatccttacccacagatgtatgaccccagccaccctgcataccgggctgtctctcctgtcttaatgcacagttaccctggggcctatctctctccaggatttcattatcctgtttatggaaagatgtctgggagagaagaggcagagaaagtcaatactagtcccagcatcaacacaaaaacagccagcgaagccaaagccctggacctactccaacatcacgccaaccaataccgcagcaagtcccctgctcctgtggagaaggcttccacggagcgagaacgggaagcagagcgggaacgggatcgccactcccccttcagccagcggcacctgcacacacaccaccacacccatgttggcatgggctaccctctcatccctggtcaatacgacccttttcaaggcttgacctctgctgccctagttgcctctcagcaggtggctgcccaggcatctgcttctggaatgtttcctgcacagagaagagaataacagaatcggaagtgtccggtgccatgtgactggatcacatggggaagcgctttatatagacatcagttccatggtgttaatttgaaatgccttaatggcaggcaaaaaaccagtcatttcattttgtaaattacagattttatcacagagtaacaaatgttgctgtaattaaacttctgttttatatatatgtatatatatacgtatacatatctgtatatatacatatatatatatacatatatatatatatattctttacttttttgtaacagtaaccaggctcgcacacacagggtctgctgccaagttgcaaaccactcagtaaaggaaattaaaaaagaaaaaaaaaatgtatttgtcatgttgaaagtgttagccacaacaggctgcttacattcttttccttttaaattgtaaataaataatgttctgtatcagtgtgcctgaaccttgcatatccttcatctctctcccataaaacccctcagaaaggccaactgtgatgatgacacttggtacaatttagatgtctaattggtggctcctcttaaagatgcatcagtgtaaaaaatgtccccgtggtcactctttgtacttgtttattgtggaaataaatacttttggaaggcatggggttgccagaaccacaaaaactgtgttgtatatataatgtaaaaattaagatggggaaataatgagcatctgtgaataatgaggtgtcatttttttttgataatcttgaatggcagataacccaatagcctgcataccagagacatctgcgatctctctcttacttgaatagccctgcagtccttttttttttttccttttttttttctttaatgtttacaattatccagttttagaagagaaggattttaacgccattgcctggttacttgttttatgctgtaatctagtttattttatgtaaaatgtatattgaatgctttcctttttatacctgccttaaataatttggcaatcagaattaaaaaggttttgttttgtttttttttt

SEQ ID NO: 819 - protein, 1495 aa, Mus musculus; identical to SEQ ID NO: 817

SEQ ID NO: 820 - DNA, 127126 bp, Homo sapiens
  misc_feature (1)...(127126): n = A, C, G or T/U
agctgcaaggcataaaaaagacaatttgctgctttttattttgattattttaagatggaggattagagactatatgaggaattacataaacatagagggtttataagtatataaagttcttcaactttatattgctttactaattaaatgcattgtagtcttaaataaattcacgtaatatttgctctatatcatcgcaacttgtttaaggtaaactgtattgtaaagacatgtcaagacagttattactttccctcccttgggtggagggtctttttgttatactctaaggaatttaaactgaaggtgaattaatagggcatagaagtatcttgaaaagttaacatagcagagtaatacgatgtgtgtaaatagtcgtatttacaaaatgtatattggaaatgtcccacagtctttcatggcagggagaacattgttgatgtttttcttctctgagacccttcatgctccccaaaaggacctgaaatgttatggtgtgcaggggcccttctttccacggtagacaaggctcttagtgctttgtcttgttccagtgatatttcaggataatgcaaaacgtcaaatgtttgaccaagaacaacactgctcgtctccttttggcaacagttatccagaaatggatatttttgtttttttaaaaagacagggtccggctctgttgcccaggctagagtgcagtggcgtgattatggctcactgcagcctcgacctcctgggctcaggtgatccttttgcctcagcctcctgagtagctggcattatagaccaccttgcctgactagtttttttgattttatatagagacggggtcaccctatgttgcccaggctggtcttgcacttctgggctcaaggcatcttctcaccccagcctctaaaagtgttgagattacatgcatgagtcaccacatccagcctgggaaatggatattgtttaaagtactacccagaaacttaaattggatttagcatgcaggtgtgaaaaagtagagacagtgttttttctagaggacctttagcaagtcaggatgttacctgtagggaaaaaaagcaaagaccttcttgtgtttgtgtgggtgtttaataagtcatcaactgtattccctagaaaccagggcaggacacctgcccactgccttgaggccatcctgttgataagcaaacccagagagataagaatctttctccataatcctctgggatagccagtaagtttctcattatgtctaaattaagttctttttcctataaattaaccccatttccatgttggtttcattttttataactttgttttccactttttcccttgatcctgagtagatctcaagtgtcaatgttggcataaatatagaaaaggtaggcctaggaatagactcccttacaaatacacaaaaactggagaaatagatatatatttagacatgttctcattctgttgcccagactggagtatagcagtatgatcatagcttactgcagcctccaactcctggccgttaatgatcctcccacctcagcctccagagtagctaggacataggcatgtgccaccacgcctggctaactttttaaaaattttttgtagccgagcacggtggctcacacctgtaatcccagcactttgggtggctgaggcgggaggatcacgaggtcaggaatttgagatcagcctgaccaacatggtgaaaccccgtctctactaaaatacaaaaattagccaagcgtggtggcgcacacctgtaatctcatgtactcaggaggctgaggcagaagaatcccttgaactcggcaggtggaggttgtagtgagctgagatggcgccacagcattccagcctgggcgacagagtgagactgactcaaaaagaaaaaaaaaaagaaaaaaaaattttatagagacagggtctcgctatgctgagcaggctggtcttgaattcctggtttcaagcgatcctccagcctcagcttcccaaagtgctgggattacaagcatgagtcactgggcctagcccaagaaataatctttgatctttaataatataccctaaatcagaggaaataggcaccaaagaaagatcaccatgttttcctgtgttactgctagaagcccctggcctcctcagcattgagatcgtctgtctttaaaaaaggaggaaagggaccttttgatgaccttaacaatgatgtagtacaagcaggggcagagctgatcttgagatccaaggagcgggtagtggaggttgttggagggggatgatactgttttgtttgtttgtttgtttgtttgtttttgagatggagttttgctcttgttgcccaggctgcagttcaatggcgcgatctcggcttgctgcaacctctgcctcctaggttcaagcaattctcctgcctcagcctcccgagtagctgggattacaggcatgcaccaccacgcctggctaattttgtatttttagtagagatggcggtttctccatgttggtcaggcgagtctcaaactcccgacctcaggtgatccgcccacgtcggcctccaaagagctggatgatactttttaaatgccccttttacactatcctcatgctccttccacccctctgttccaaatactcatttcctgacatctcctcctttctaccacatctctgagtagacactaaggtgtaaaattacatagtgcttatattatacagtagtgtattgatattatgaagtatatgcatgtggatattagaatggtgacaaataggttcctagttaccttgatgagagattaagataacattttcatctctataaatacagaaaacttcccaattttgtgagaggagtagctctgattttcaaaactggtagttaattgtcttagtttcagtcatcaattagctgatggtcctctgatgccttttgattggcccctttgtcaaacaaaacaaaacaaaacaaacacaagaaaagccagtctgacaacactggtttattcaaaagtctcctggaagaacctgggaggaaggaggtgggggtggggtgtaaatggagtgtggagatgttggaatggaaggaaatactttaatttatcaaaatggtttgggttaaatatgtggtagagtcgggcctaagccttcatcttgggccagtagggtttctcagaaaggtttaaggtttgggtttaagtgttgaagctcgggttagattagattatttgattattacaaaccctaaactttggttttagttagacttcatctgtgctgcagacgctgtaatttgttttgtattggaggaactccaatcttctccagcttcactaggtctcatttttaaatgtcccattcttttaagaactacctatatattatttccaaactaatataacatatggggtaggcatgggcttccaaaggctgagatgtagatgacaccccagggacacaggaagtgcccaagagtgatctgatcctttgagaaatcactcttttagaagaagaaaagttaaaaaacagtatggtgctgtattcttatcaatggggcatacacaaatgtaaaatctgtatattcaaaaatataaaacaaatctcaaagctaaaatggaggctaggtagatatcagatccctaatttgcccattttatttgttaaagtacagctttgatttgaatacaaattgacttagggagagctaaggactagtacagattgcattcctctggtttatatgtcccaataaagggtggaaactgctgtttattactatttgcagcctcaaatctagttcatttatggtagtgaaacagctaattggcaatttttttatggactaaatatattgaaagctcaaacatgagtcaatagccattatttaaaatatgtgacataaatatttttattgatccacgaagtcatcactgaatatttacatcagaagctgtcttctgctagcactcattcactttacatgtccatatgactcagttaagacacaaccttaaattacaattgtcacgtggaaattacaatcccagtagtactggatctttaaaacttgggatcatgatgctttcagtttacagtaacctttgactttcaaatgtccatattgtagcttctaaaaacaatgaaggtaacaataaaaaattaaaaattaaatgtactctaaaggcttaatatatgtaaatacattagcttaaatatgttagctgttatagtaaaatgttaaacttgttatttcatattaacctctcttatcctatgagctgagtctcattaacttggttgctggcatttgtcctacaataaattctaaaatatttctgtgtttgtggattgtagatgtagcattcagaggattcatgatgcccccttccccaccagtggggttaaagatatgggggaagaggaattctgacccttccacagtttaaatacgtgtactgggactgtttaacagttaatcttcctagtacatttaactttcataagtcgattttttaaaagatgaggctggcccgaggtgttactatgtttagctggggccttattttaatattaagtttttcttttttggagtcacataacaccaggtggaaaagatttgttactaattccagggaagaaccattcacatagtgttggttaaatggtcgcctgcgttcacacttcagtgcctgtagaccagagccctggaaacaaaagggttacttgtttccccaccatcgcctttacccgcagatcgatttttcttatttaatcagcgagtaaaaagagagacacagggaagaaaaaaaaaaaaaactgcaggaagggcaaagtggtggggggagggttgaaagccagaagctgcaatacagaaaatcagtcttgggagttgggctgcgaagtccttggaacaaggaagggaagccggcaaaatgctcgcagtcagttccacacagccagcctcccttttctcttcgctacgcgctagcggctcgtttggcttctctctgccaccgagcgatcacatacattatttcccccaagataacacaatcaaacttgtatttaccgacatcctctcctcgcagcccgtttgagatttgttttaataaataagtgttttatgtgaatgatgtagtaattgaaaggggcgcaccatttttttgccttcttactgcgggaggttcctcaaccccaatctggttggaaaataaaacgctttgtctccacaaccacaccccccacagcacccccacccgctctcagtgtgtgttttatacgtgtgtatatctcaaccccctacagtagccaagagaaagcagctagccaatgagagagcccagtttcataaaagctgctctctgattggcccgatgcgaaagggcactgggaacaaagaaaagtccctttcaggtatagaggctgagagcttcttttgctccactccccctgtgtgtgtgttgtgtttcagtcctgatttagtgttgcagaacaagcttgttgtgtgtgtgcaccagggggatttttgttttgctttttttaaattttaatttttgcttttataaaaaatacacaggacggtctgtgacatttgatggtccatcttctttaataataaatttgttgaagagattataatttccaaaataaagcggctgcaaccaaacacattcaatgcagttagaaggaaaaggtcaactcgatccaatacagaccgtaagtacggttgcgtggtgtgtctctatatagcacttagcggggacttcatgcaggggaatgtgcgagttttatgcatagaaatgaggaactagttacagggtttggcttttgcatttagaacaacaacccaagaagggtgaattttattcagtggagggtgaagcatttgtaacttcacacaaattaagcttgactgggcactcggggtaacttagaggaaattagcttttgggctctaacccaaaggagaataaaagtgacacagttgcatatcctggtctgcagtgtcaattctctagctcaccttactccctccctcttctgtcctagctgggcagacccccctcccaaagcgatccaggaaaatgggggcaagggcagaacaagccgatttctgtctcctgtcagatcccagtgcccgataatttaatattaaacaagggaatagtcactcattacatgtaatggttataattaccattcgccatctccttaaaaaagcaagcaacaaaaataccattaagagaaaaaataaaagccccacccaacccaaacaaacccacaaatagtaacaatggtgtatttattacaggaccaggctggggagcaagcaaaaggtttttctttgtttaatacatgaagtgggggtccctaaaatccaagtagctcggnnnnnnnnnnnnnnnnnnnnnnnnnnnnnnnnnnnnnnnnnnnnnnnnnnnnnnnnnnnnnnnnnnnnnnnnnnnnnnnnnnnnnnnnnnnnnnnnnnnnnnnnnnnnnnnnnnnnnnnnnnnnnnnnnnnnnnnnnnnnnnnnnnnnnnnnnnnnnnnnnnnnnnnnnnnnnnnnnnnnnnnnnnnnnnnnnnnnnnnnnnnnnnnnnnnnnnnnnnnnnnnnnnnnnnnnnnnnnnnnnnnnnnnnnnnnnnnnnnnnnnnnnnnnnnnnnnnnnnnnnnnnnnnnnnnnnnnnnnnnnnnnnnnnnnnnnnnnnnnnnnnnnnnnnnnnnnnnnnnnnnnnnnnnnnnnnnnnnnnnnnnnnnnnnnnnnnnnnnnnnnnnnnnnnnnnnnnnnnnnnnnnnnnnnnnnnnnnnnnnnnnntaacttgtagcttcgcccactgcgggggggcggggggaggaggttgggggagtgtgtgcagggggaggggagagactttcagcttttttttttttaaagaccagatcagtattttcttgatacgcttgtcaccatttttgttctcacgacaaccaattgagcccttgatcctcacgtgatgtgaaaggcttgcactgtaacaaaatcgctccttttagatggttggttgttactaactcgcccatccccctctcccagccccgacatttccagcaaagcgactctccacttccaatccatcaacaattcattactgcttttagcttccaaacgccagctaattaaaaatactaagccaagctccggggccatctgactaaacacaggaggggctgggcgaagggagaggagagaaaaaataaataaaagggagacacaccgtttgctgcgagtataagagggaaaaactcccgaaaagggtcgccttaaaaaaaaaaaaaaagaaaacaaaaaccttattttgactctaattatcgaattaccacatgactggctgacctgagcgacagaggattccactcccctcgggagctatactaggaactcagttcctttttcttaaaacaacataagacaggaaaacatcacatcctttaggtttcgaagactgagcccattttaaacgccgttattttccccaccccaccgccccaagccccccgccccccgccccgagcgaatgctgttataactggtttatcagctcactgaatcatctgctgtctcctcctccacacctttctttttctcttcttgcccagtttctcatcccaccctttcttctcctcctcctccctctactccccccctccttttctcttaagttagttcaagaaatcaaatctgtcaggacgggcggaaaaatgccacttcccgactaacaggcggaatccagcccagattttcagtcctttcttcttattctttcttccctttcactaatttatcccgatgttagcacattctgtctcgttactagcggacgcctgtaggtttgctacatgggatcattactgatcacggtgactctgaagtctggaactgaaggcggaatgagaagttgggaaaacttttttctctaaactctctgttttttaaaaaactattattctcgatgcttgttaagaggaaaaaaaaacctttggtgcttctgttgtgaatgtgaaacattattttccagctgtacagtgacacattttttttaaggagaaaaggactgattcgtttgccaaaaggggggtggggaggtggaataatgttatcgagtgattattctggctgagatgtgttatttggtttcttccttcttgatcatttggtgtttaagtaaaatgaggcacaggcttgtttgccgagtggagtgggaaaggcattttgatttgctggcctaattaaaaaatgataaaggattaaaaggtaagcaatgtctgtgtgtgtgtatgtgtgtgtgtatgtatatttatttatttttttcttgacaatcaactgttaaaaaggggctgatccctttaaaaaccgttttaactgctctttgtcaaacacactcatttgcggtcattgaggccaccttggcgcagatcacttaaagtgtatgtcttaatcagttttctgtacagtcagtagcaccgtatttaagagagtgagcaattctctgacctaggaatatggtagaattgtttaaatgtatttttttctcaaaaggcaggtatttaactttttatataacactgtcttttctagagagaaatgctcttaaaagacatgcatatttcaaaaaagaaattgtagaagctgtttgggaaaagaggataggagggaggtatgtgtgtgtgttgggggcagttattggttgttttttctgttccttactaggaacaaaaaacagattgcccagacaatttgtaaaaagaagtactgaaacctaaattagaaataaggaaaatttagcaacattctattctgaaaactagcctcagaacttccagggtctggtcttctaaattgcaagatctaggacatgtttagggatgtttaaagctgtgttcttccttcttgtctgagtgttcaggctgtgtttctggggttgagatatcacatgtgccagactgaaatcctaaactttaaaaaagaacacaaaaacctttctggacttgaatcagatccttaagataatttaatgcttttaaaaaggtgattatccttgtgttgttgataaagggattttctttttagctaccgtaagatgcttactgtcataggtttatttttcgggtttggttattttcctttaaacctgatattggactgtgaggacaatacatgagccaccttactctccatccttccctgtcccctttactgattccccaatactaatcgttttttattctggtaacacccagacaagaaatattcgacttttcccccccccttcacaggaaaaggtggacctggactgagggtgtaaaatccctggacacattcgtggggcaggaaaaagaagaggaagattagaagattttttttttctttgagagaaagcccagcggagataaacgaatgtcccctcatctccaaagaaaagttcatcggatttttattctagagagctcatcttcaggatgtcagtgaacatttctactgcaggaaaaggtgtggatccaaatacagttgatacttatgacagtggcgatgattgggaaatcggggttggaaatttaataattgatttggacgctgatttggagaaggacagacagaaatttgagatgaataattccaccaccaccactagtagcagcaactccaaggattgtggaggtccggcctccagtggggctggtgctaccgcagccttagctgatggcctaaaatttgcttctgttcaggcctctgctccccaggggaattcacacaaagagaccagcaaatcaaaagtgaaaaggagtaaaacttctaaggatgctaataaatctctgccttctgctgccttgtatgggattcccgagatcagcagcactggcaagaggcaggaagtccaagggcgccctggagaggcaactggcatgaattcagcgctgggtcaaagtgtgagcagcggcggcagcggcaacccaaacagcaatagtaccagcaccagcacctctgccgccaccgcgggggcaggctcctgtgggaaaagcaaagaggagaagccaggtaaaagccagagcagccgaggcgccaagcgggataaggatgcggggaaatccaggaaggacaagcacgacctgcttcagggccaccagaatggcagtggcagccaggccccttccggggggcacctctatggctttggggccaagagcaatggaggtggcgcgagccccttccactgcgggggcactgggagtggcagcgtcgccgctgcaggggaagttagcaaaagtgccccggattcagggctcatgggaaactctatgttggtaaagaaggaagaggaggaggaggagagccacaggcgaatcaagaaactgaaaactgagaaggtaggataaagtcgccttcctagatgtcctactctcctctgtgtgcatttgtgtgggtgtgtgggggtgtgcctctgtgtgccttacactttatgctttctggttctttgtgagatttctatgatatgcatcctttatattaaaatttgatatgggggagcctacttgggtgcagtgtttggctcttgcttctgctgtccttgctgctgctgctgctgctgctgctgcttgtgatgctagtgtttgggttcccaggtgggagggcctgagtgttctaagtaccttttgccctgtagatcggttcctcactagtcagcaggttgccgtgtgcttttaatagaaaacctgctcatgcaccctcttgactcttgtcctgctttcttccttaaggggaacagttttctattttaatttattcatcctagtattgcgggtaatgtgtccttaggtgcaaggttcaagttccctccctggagaggaatgtcgaggattcgaatttacattctacagacctcatcccttttattttttcttactgtctccaaaatagtactgtgaaaggatatccttgaatgagttcttgttattggtcctgaatgaaaccccaagcttgatgtgttgggtcattggtttcataactgcagaaaaactcgatggttttggtggctgttagcactctacccctgttccctcacccagttcttagctagagatttaagagtgttatcacttggatacctgactggggagctggacggctgctaagaagaataaaacagacttgctggactgatactcgtgaaatgtgaaaatgtagccaaaggggatgtagacggttgagtgaattggaatatagaattatgtgctgcatttaaacggtgtggatggttgatttagaccatttggacccttctccccttctttgtacaagtctatagttagacactgccttggaagaactgcctgccccgacacccacaccatgttttgctgcttagtcatagaccacattgactaatgtttgggaacagaaggtgttctgtccactaggcaggttgggaaggagttaggggtgtgtgtgtgatatttctatgaaattaatcttcatattaattctacaggttgtgccttgcagaagcaagctttctgtcatgtgggttgtggcatggttgttggggaacatccttattaaataattttgatttttttttgctatagttggcgattgggattgtaagtggtgataatatgtctttggagaattatttctgtgtaaaatggttcactgctacttaaacttttatattcttgtttttgtgttcaggatttaagttggagtataggagtaaagttttgatttttaaaagttgatagaggcacattaaggtgtagataatgccaaatttgcaaaatgcctccaaacgcttataaattcatatcctcttggtcaggtacattaatgaatataaatgaatttttgaaaattccgggttttgattcttatatttaaatgtgtagtttcacattatttccgctaaaaggtgttctgaaatcttcttattacttagtacagtagggcatttacttttgttgccaatagtcttcaaattgcagttctaatctgctttaactatctagatgaattgccctaatccagtgctcacaatggctgtggttaaggagtcagagccatttgattggattcactggctgcttggaatgtgggaggtactgcccttttgcattccccttagccttttaatcttccagccaaatgttcacattcaacaattttgtttagctggcaatcggaacatttcagtatctaaaaggctgctgtcatggcaactgagattagagcgtggtgtcgtttctccagtttttgtgtgttcttttcactttccagtcacagaggaaactgggtgaagaatggaagaattaaattattcatatacatgcaactcatcttcagttagagcagtataaatgtgataaatatgaattacataaatgaagagcaaacaagtcatggtggatctggggtgggggagggaagaaagcacactgcaatttagattcacttctgatcctataccagaggaagctgtgccaccaatcttagccactggagttggcacaggggcccctcaaaggcttggatccaggggcttggatcctgtagtgttggccattctctgtcaagttgggcgttggctcaggatctcaaacattattccttaaggctttcctccccacccccacttcaccctgagaatgacttctcttaagaatgctttcatccttggcacacagaaatggcactcccttgcatgaatgccacccaggaaagtaactctaattccactaactagtggttgcatcaaattaggcatcaatttagaaaatgcttcctactgatgtgagaatacctatttagaaagtaaagatttagtaggaccagaagcttcacctgaaaaaatatttcaacactgaggttttttgacattttatacagtgttttaatttccttcagcctggcttgattatctgagtttgtgaagagtaagtgcctggagagtgaagattattaattttcagcaatcagatgtggctcgtgaggggccacatgtgaaaaccaaaggggggagtgtatgtgtgtgtgcatttttttttttttttttttttttttctggttggaaggttcacaggagattcataagacttgctgtcaccggttaattttcatagcatgcatgcttaaatgtctatttttggtctgtttattctgtttcttcactacacaaagtcatgtaaaacatgataaattggaccttatgaaacctaattaaatcaatgagtgttctactcctttatgtggaaaccacaagtatgttgtaaaagtcgccactcccttaatacgtgaacaaaatcaaaacatgccataattctaagatgtttgagctatatttctgtagcccattttgtggttaagccaccagtgacatgtctgaataagtagatttgatgggttggcttttggttgttaaaacctgcctctccaccttcccctcctttcttgtgaagcataatagccttgtattgaagctcttctttatgtatcctcctagccatcttacagttttgacttatcagatagggaggcattcagctgggctttataaataaacagtttatatgtaaagttgatgggtttatttgatttctggaaaattcaaaaatatatacaaaaactcaaaaatcctaaaagtggctgatacttaaacagaagtgaaaggcacaagaggtcatatagttgtgtctcaatacctattcagggaagagaattatttctgtaatatcatattgctttcattaagatggccctggtcataaaggtggtgtctacaaatggacctgtccataaaggatatcattcattttattttattcttttgtagagtcctttttatacttcaccagggaattctggcacattttctaagtgagtgtgagcagtttaagaacatattttgattaatgagttttgtggacattatgctttttttttttttcaaatatagtgtcccatatgaattctgcctagagtgtagtgtatctactgtgaaataaaagggcagaggggtcacttgctataattaaagaacagagtccattgttgtcggacagcaaactgttttgaaagctacataagaggtttagctgttaaagacgttggtaactaagggtggcgtccaaatcagcattgatccagctccttacttttctataggcctcctcacagggtgacagggctttttgagggagggggctgccctttccccaagaacacatggaacttaggtatttgtgtaatcagacccatcactgaattctgactttggtgtgtgaaatccgtttgctttgctggagagagaaggaatatgcataactgatcaagattgtcctataggagataaataatgttttgcaacttttaataactttgcaaatagtctgtaaaaaacggtggggggagggattgatagtccaaatgtcgtgaggttaagaatgctcttcaagtgaaattgcttggctgcaagatggttttaattagactgttataaagacttatttttcctaagcagcattttatagttagtaaatgaaatgtatgccgaaagtgctaagcagaaatctccctaaccacagaggtgttcaataaccagattcgaacaacatggaaagtaccatctgttcttcgttttcagcgtgaaaaagagggattgaatggctgcgatttgctccaatttcgacggtgtctgtgtgtgcgcgtgtattcttttttaatttaaaaaagttcacctggtacttcatagaaacttgaaattgcagtaatatgagcaacactgtgaaaacacatgttcctgcatttattttaaccagttccacttttatttaaaagatttccagaagcccagccattgaacactttataatggttatacagttcctgcaggcaatcacaatgagcggtcagcttttccaaagatctgactatttagtcagtacttgaattattctgtcaattttccccctggaggcaaggaggggaaaaggctctcacgccaactctggtcagcgtttatcagttaatctaattgtgtgtgatattgctgtggactggtgtttactatacatagaccttgctcttgttcagagctgtaatctaggattgttgataatgaggaaaatatccttttaaggaagggtaacttttgagtccttgacttttagacactaagaatcttggttctgggtttagttagagccctgggtaaaacattatccggcctttgtttgaggtcttttattgaagctaatgactgggcttgtgcctccctgagataaatgacattatctctgagtggcctgacaggaaacagacatgttaatggtgaagctgcggggaggatctgcttgggttctgacaaaagagtcgagaaagggacccctggttgtggtcattaacacataatgcattcttgctcttcctaagaggcccttgataattggaaagctattttagccacaagcacttaaatcataaatctactactcctagttctttgcattcttaaaagtagcaaagtaatgtgttttttgttaacaagtgtgtgatctggttttttaacgtggtggcagctctaggctgcctgggtaatgacgtgtgggagagctgcacgttgaattgtttttatcagttgagatccttctttgtctttcagcattgctcagccatccctctactttaataaagtgaaaagtgggtacagagctgaaaataagtcatttttatgcttgaagatgtcttgtgggagggggataaaatctgtttcataagatattgtgcagtgatttgaatgtgatgaaacctgacttggagtgtatgttttcaaaagtcatgagtataattgagtttcaatgcagtttaaactctctgcttcttgaaggaagataattgccacgttgaacacactctagaggtgtagaagaggtggcaggatcatgttattctattctttaatattaagcactggaagtttttcatagtaattactgcagcacaacatagttttgattgccagcactctgaacttgccagcaatctgaacatcaagggttttgcttgaatacaaaacactttattcctaaattacttgtattacattcctgtgttatatggaagtcagaactaaggaaatactgggctatccttgttagcaacatcttagggaaaataacccttcttcgctaggattcttgttgataaatgatcataatactctcctaatgtagtcattgaagattaaagggatggagaacaggtgagctccctgcctcagtgatgacttagactgtcattagagagtaagtaatatgtgtatgatattggtgccctgtaactggtatgtcataggtgtgtgtatataaatgttgtaactgcatatacagatgttggattgggagtatttagttagtatgggttttattctttaaaaaatgttcactgttggttttacgttccactctgttgcagaatatatggacctctccctctgtgtctaattctttctcccaactgcagtttcactagtgactacttgctccctgtcacaagttctttttaatttaagctcaaggttttggcaatgggaacaaagcctttgcaactgaatgaaaggttgttaaactattcatagttgattgaccagcagttgggctgtttgtaatgttattttgagagctcaaaggatatgcaacctcttgcatatccaaagtgagactttgctcctaaagctgaattttgcatatttgctaaatttttcttggaaatacctttgggaatgtagtagaaaagatgatgggttttgccttaagaactgaaatgatcacaaagcaaatacttatattttgctaggtctgtgggccttgaaccacagggatcccatctggtattcagaaggcttttccccccagtgaaactaaatgaaaacttaaaggtatatattgtaactgtaataaagaactcaaaggaaaaggtgtttcggttagaacaaataggtttgaaatgatgaacaaatacttctgtggatttttcaaagccacttactcttctttctcatttccaccccccgacctagtttgaatatcattcactgtgactattccaacccaactactgagctttctgcctcctgggaatcctcattgtcagctagcaccttaagaaaaatgtgtctgcagggacatttaggcatattccaataatgccacatgaatgtagcttttacagtttaaaaagcaagtaaaaatatattgattatattttgtgttgtacataatgatttcagaaagcagatatttaggttgtggaattggcttattatgctaaccagagagcagatggcatggtgccacagacgtataattttacttaaagggacttttaaggttttgatgtgttttcttttcctcttatttccctgatggcttcttttcattgaagggtaacttaaggagacctggtagcaattttactgccttcccctgacagtttgaaataatagcttggtctttggttgcactgatcttctaccagtcaactcgattctggtttttgtcatgtggcagagaatttttaaaaaaagtgttagtagtatgttttaagaagtggactcttttatatgcctcaattagcaacagacgacaaagttccaattggtcacactttcataaactcctggaagtcactgtttgtccttttgattaaagaaaactcctggtttagtttcttaggaaaagcacatctggccctctggccgcttttggtatacctttttgtccttcgcattagtcactgaaggttcaaaggttgtgtctaagttgttcctagttaggttagaaaattttccccatgctggaggaaatgtacttttttttttttaaactacactcatcatgtgtttggattcagctggcataaaagtaccttttgtttttgtacctagattttacagttttatccattattcacctcacacatcatcaggatgagttggaaagcatcttctaacttttttttccaaagcgtgcatagccagaccagtttacttctggatttcctgtcacttccttggctgattttatggatggctcatgttaaaaacaacaaaaatgtttgaactggaagggttgaagccttgggttttcattcttcatggagaactgtttatttgtgtgtggttcaccacagtacatggataatgctatcaaatctgtgctttattataggcttatgactagcacagccgcactttagttatgtgttcccgtgctttagttatttgccaattcttttgtgatggaaatgaaattagagctgaatctttgcaacgaaggggaaaataggcacaacaaatagaaactatcccttgagccagttaagaagtaagcagtggtgattaaacatgttttttttttttcaaaataagtgaaacacagaggaaactacttccttttagcttttctgtgaagttgtgtggaagatgagctcaacattttgagaagtggaggctgcagctagattttatccccttgtatcgtttgacatcttcagtaattgaaaagcgattcgtattcccaaatttttaaacttctctaaaggtgtaatttgagttaagtaatattgtttgtttctgcccccaaaagggagcaacatgatgttaaaacagagcagttgagcctctccgcatccaactccatttggtcaattgtctccatttacattccctgcccaaatctttcaccagcctttcccatgatgccgcagcagatgccagacactgaagtagaaagggagcagctgtttccaaacattactccattgctgtattatcctccacaatctgctttcttttgctctccccttcccccattcttaaaataaagaagccttctctccctttgacttttgcatcctccagtttatcagtgtgcaggttttctatcttatcagtcgcactggtttcttcagcaggtccctttattgttttcgctatgggagcagatggagggccctgggctcctgggggcgtggccgctggcacctcgggcccggggctgcgcgttcccgacggggcggcgggggcgtgcagccgggaacgcgcccttcttcccgccagggacccgtttatggccctgagcgctgtaaatctgtcagctcttcacgacgccttcacctctttcttcatttgctccagcttctagtttgacaacgttcccctgaggcagaattctaatctgcttccaattagttgcaaaatgtgactgaaatttccacattatgactgctgttttacttgcacgcacacatctagaaacaaattaatgctcttgaatatttattttttgagcccttggatttactttaagaggaagagtttccaactgtttggaatgacttccaggatttgcattttttcccgaaagccgaatatactgggtacattaaaacaaaacaaagcaactatggttgccccccatcacttaataagacttttccatcttttcaagatttcccaaaatgtattgcatatgtttaagtaatgcaaataaattttgtagtatttctaaaataaaacaaggatgtttggctaaggaacggtccctatgcagtgttttaataaaagagaaatatacagacacatttccttctaaatatagtttaagtatactttggccaaaacacaaagacttttgttccacacgtttaaattctttcattcaatattcaaaagctgtaaacccaaataaacgaattgagtgattaattggcttggcacaaatctaagggtagcattaaataagttactgtgggcattaatgtgtacccaagtttttgtgtaggtctctggagcacaccctccctcagcgagcggctggggtggttgtactgagatcagtatagtaggtgggttcctgtgactttggtcttcccagtccctccgtacgccagtgttaggagaatggacctagttctgggcttcggggtggttctgtatagagggtgatcatcacttatcaccccaactccatttcctctctttcagtgattttttttaacaaagatgttgatccccctgattatatgtaaatattagagttgtttaaatcttggttgctgagaatgtcaagttaagacaaccattttattacttgccttaaagactgctttctcaagtactggagaattttagtaccaaggcagtggattagtatttgtgaaaaggtgctactcttaatgtaaacggcgaaatttactggtgccttttatagtagaatttagtcctcaagcatcttggcagattgatatcaacagtaataatgggctttaaagaggtgtgaaggattttattgatggtaaagtggttatgttgatcgcatcactgtgtattagtttctgagtaagaactgcacatgtaaatggatgcatgagttttttttaaacatctttatcatatataatcataaaaccctatattgattgatttctaatgctcttttatgtgccactttgaatctctaatcaggaggtggagaatttatttcattttgtttcaacaaaacctattcaaaattatttcttagatatatagggtatatgttatttaaatggttttctaaaaacttatttttagatatgccagaattccacaaaagaagtcggagtgctctttgtattgcttcctttcttcttactcaatgactagtagtagaaaaaaacagccagattgaaatccttaaaaatttaaaatgttgggccttcagattgcagagacctcctgggttaaaaaaatgaaaaaattagtggccctgtagtgaaatgctcacaatagcaatgattgtggtagcccctcaagtcctggggttcactaattaccctttaatgaggtcagtctgccccggctttttccctaccttgggaggaaaagcacacaagacagttggagttcaagtggatcttgctgtatttgcaacttagcataactgctttgaaagcccccagggtgcttaattggggcctgggcatttttgtttggggagagactacacacagctcctcattgtgcttgtagaagccactgtgcatcttggaagcattacatgcttttgttgatggtgcatagttttataaactccaaatgagcttattgctttttaaccattgggagagctaaataatggaagaacctagaagtctttgggttgggtagccgccaaacagaaaaaaaaaaaaaaaaaaaaagagagagagatagagagaatgaatggtttaattggagagcaaaccatttgtttgcagattaagatttacttggtcgccaaatcctatggatgaggtgaaagaatgaggccgtaaggtacagaaattgaatgcccagtgttatgttttgtgatcatgctcagctgtttttaccctttttttttttcacaaagaaggcaaaagaagaatgaattgtttaatggagagaactgcctagccaagtgcatcttttaagctgtatagagggagggaagaaggtggggaggcagattatttctgtgctccctggtcaggaagcaaaactctcaaggttcttttagctgagagaggggctagaagacttgctgaatcttcctgtttgctcacttaaggaggaatggtggtggtggagctagggagtaaaaagtagaagaaaggtgtgtgggaaagagggtggttggggtagagcttttgttgcaagggccctagacaatgcattctcttgaataattgggaccatttatagaaattccccatgatttcattagttagtagccctgtttctgaatagaaagggactctccagcaacagcagtgaagtggtacagcagttttggagggggaaaagcagttgcctggcagcctgaatgtcagtatgtcttttttttttttttttgaacaaacaaaaaaacccctttcctaaggactagaagaccagaaatcatggcatttgtccatgttgtagttgcagtttgtccttctaatcttattgtgaataaataggtttctggaaagacctagcattattttctagaagtatcattctaaacactcctcaactcactgtttttatttttactttaatcttgggagtgaaaccctttatcttaatctgctcttttgtgtataaactgtctctctttttgataactcaggatgcatgccatgaaaaagcccatttcttctgtaacattaaaatcatttgtttattgatgcatatttgatacattgaacttttaaatatctgaattggctttaggtgatcttgttttgtttttctcctagctttaagttctggtattatttattattttggtatcatgatccttttgaaatggcatgatttttgaatccaaataatggctgatagcttcattttatagatctatttcttctgaggggcggtgaacaagaggattgtaggaattggggagcaaagagagtgtaaaaaattaggtctaagtagtttcagttttgtcaaactgctacttactttttaatgtgccattgctcattcctgattctttcctgttaatattttccgtattagtgaggaaagagactggattttacttctgttaatgtctaaaactccaaactttttttttgttttttgagatggagtcttgctttgtcgcccaggctggagtgcagtggcacgatctcggctcgctgcaacctccgcctcccgggtccaagcgattctcttgcctcagcctcccgagtatctgggattacagacacccaccagcacgcctggctaatttttgtatttttagttgagatggggtttcaccatgttggccaggctagtctcgaactcctggcctcaggtaatctgcccgcctcagcctcccaaaatgctgagattataggcatgagccaccactcctggcctaaaactccaaacttttaaatnnnnnnnnnnnnnnnnnnnnnnnntttaaatcttgtgtcagttggctgggcgcggtggctcacgcctgtaatcccagcactttggaaggctgaggtgggcggatcacgaggtcaggagttcgagaccagcctgaccaacatggtgaaaccccgtctgtactaaaagaatacaaaaattagccaggtgtggtggttcgcacctataaccccagctactcaggaagctgcaacaggagaatcgcttgaacccgggaggcagaggttgcagtgagctgacatcgtgccactgcacaccagcctgggccacagagcgagactccgtctcaaaaaaacccaaaaaacaataacactgccatagtcactaagtagactaaatttgtgtaaacacatctttttaaagttataaaaaaaaatcatgtcttaccagtaggaaaacctgcagatgctcacctacatgtgatttctttggttgactgaatgctcagtctaggtttacttagcaaaccaaaacaaaagtgcaaagataaacatggcttctcttaatatttgtgacagcctagaagctttgcaatcttgaaattgctctacagttttaatccttcctggaaagaaagctttttaccaaattgtcagtgcctccactctatgaatgcttctgaggatttaaaaaacaaccccccgaaatacaaatttatttcagtaagtttaatatgtgctcacatgtagcataaagaatggagagtaagtgctgagctttcggcccctcacaatttaatattaacaagagttcttgtctcttgcttctcctctctaacctgttctgtatactacagacgtggatcctttttgttgcccatataaaatgtgaaaggaaaaatgccaacctaagacactctgaaaatgatttctataaacctgtttacaccaaagtctaatactctctatcttagctcacattaaaggcttaaagtctcctttgaaacactagcatttgcatccgtaagcctgctataaattcctgtacattatttccttgtaaaaaccagtcttttccatttacctggagtcagtacatctgcaagagttacttccagcagataatcctgtctagttttagactgatagaaattttgtaatatctatagctatatactggtgattggatgacaacacgaaatcacttgcccttgttggatttcagctctgtaagtatattgggtcttaaacatgttaaattttccttttttgacacttaaagtaaactctgaagagggtggaagcctttttacacttgaaaaatctagaaaatgccctatgtattcaaatcacattgttgccagtgtttaacacataaacacagatctcttcaaatcacttgtgcatttggtgagcagcttgccagcacacaccagtagtaggaggaagttaaatggtggtgaaaaaataggtactgttttatcttttgtctgtaaaataaattctgaaagctttttgaataattttactttggatttgttgttgcttcaggatctaaggaataatactaattgtacaaatctgtgcagtgaggtgtagttgcttccatgttatttgagcctgaatgtgcgtgcataattggagagattattggagagagagtgttttgctgtggtagatgtggtttaaatcctagcactgagcatagcatttactttctcagcttacccacaaaatctgtgactaatttagtgaatgtgaagatttttgtccagatggttaggtttaattgtaaaaactggaaagatttcaaagtaccctttgggggagtgtgggaaacaacaagtaaacaacaaaaaagaaataaaagtaaccacagatcactaaatatagcatatatgtatattttatatttataaacacacatagatatatatacttaaacatatacacatatagaagtacagtatttacagtcaaggaacagcttaaagaatttgttgtaacagcacgaaccaatacaacctacaagaggagtaatttttaatgtttaaggatttactatgttctgttcttaagtgtttcctaaatgtgagtgtttagcctctcccgggctcagaataggtttccgctccagtgtgataccactttgctgccactcgctatccttggtttaggggcattgttaggtacctcaccaaacattagggcaaatgtccctctcactcaggacctccattggctggtcttcctctctgggatgctcttggaggcctgggctagcctgttcttcccaaactgcagctgtgaagctcaaagacggagtaagcttgtgaaagggacagtgagatggtgatcagtgtgctgtgtcaggacgagccttcttttaaaacagcatccatttcttcttcacacttcttgcatttgatggccatgccagaatgagtacggtaatcagaactgatgcttttaaagcgactcagggacctcctccttctggttgcttcctgtgcagatgagcgcttaaagggcagaaattggtctcctccccttttgtaaagttagaatactgctgacctaaatcttgggcccataaattagcttttgaagttggtgggctaatagggttctatagtgaattttatttatgttacttggaattataagaagagaaagaagagtgatgtgtcatggggtttaggaaataggacagaaggtgaggttatggggctgttgataaagtccgcattgtttaagtgggtggggtttatggtactagagtctacaacgcaagcaacatggatatatttcttgcactagagtggaaatatgcccaaatatttataaatcaacatatttaataatattcaggaactatagagaatgagctaaatgtatatgtatttatcatatatcaattgctgtcatatttgattattgagtcttcagcatttaaaaatggctaaggaacgagtttgaggttgtcttgcatggtaacgaagataagcagaaggccagacatgttgggatagtgattttcagattatggaaaatctgcgtaagataggtcaagagaaggtgcttcctgtggaggagtgagtactgtacatgtctgtgaggctattattattgccagcagcatgggagagctagataaacaaaatgtcagccaccccaaagcagaggtgatctttgctttgatccccttggctaaattcctcctgaaaatatctttctgatatgttcctatccacctaaagcctatttttttctccatttatcaagagctttgccctccaataccaacctattgaatgacccttaaggtgattttaagatagcacctcaatcccatcgtgagtcgacttttcaagaccaaggtatggaattcaaaggtagggactggtctgataggaggagaggcataagagctttcctggtgtcttaaatcacacctttgggcagtcatctcttctgcctatttgtaaagctgtgtttggagagaacctcctttacagatgtttcttaagatacttggggcccggcacagtggctcaccccctgtaatcccaggactttgggaagccgaggcgggcagatcacctgaggtcgagagttcgagaccagcccgaccaacatggacaaaccctgtctctactaaaaatacaaaattagtcgggcatggtggcacatgcctgtaatcccagctacttgggaggctgaggcaagagaatcgctttaacccgggagatggaggttgtggtgagccgaggtcatgccattgcactctagcctgggcaacaagaatgaaactctgtcttaaaaaaaaaaaaaaaaaaaaaaaggatacctggagctggcaacaagatacaactgatgaggctgaagctgtatctgatgtgtgtggttttttttttttttttttggtctgatttttttttttaagggacttttataactaagaagtgaagttcaataaggacctaataagaaaatgagatcttgaggattgataccatcttgagagtagtatatatgttatatatttcttttttccatatttgttaatatctttttacatatacattcatttctagaatttctgcatatttctaacatacccaatgaaattgatttgagaaagagaaataatagaagtagtatgcataaactgacaaagatactgtgagggcagctatacaaggtcaagaccaactggaatcccaaggacagaagtcagaaagataatggatgtgataaactcagtacagcctgtataagcagtgatacttttttatttcctctgaagccttgacttggggagaggagagggttttagagttgacagagcacagggttgtgaaattttctattgaaaatcctggcacatttagaacacagtggagaagaaatttactggaggagatttgcccacttgttgcaaaactctgttgctgtcactgtaagacctttggtgctaggaactataggtaaagggatgaagttgaagtgtaggatctcactgtgattttgaagctctgttacagggtagaggcctgtgttaagtacaagcttgagatgggagagaaagagcagatacagcaactgatgctgaattgagagaggatccaaagcccggaatcccagttggttggatgtttgcactttttttttgtctggagatgcttcctagtctgtttcttgaccgactgcacatgctgttaaatccactcaggtaacacatatgtgttgggcgcacagcccatgtccagattggactcggagttgggcagaggccaggtcatgcagggccttgtaggccatggtaaggaatttggattttagcttgaatgcgatgagaaaccatttcagaattttgagcaaggcagtgacttttttttttttttttttttttaaacaaatcttactgttgactgttgtatagagaattgactgtagagaggcaagaagaggacaagggaaatcagttgcaagactttttcagtggtcctggtgagagaagataggcttctttggtaggcatggaagtggtgggaagtggcaagaaatggtcacgttgtcctgagataatgaggatatggatatatgtggagttgtgaaagaatgagaattaaggaaaatacctggattttggaggtggatggaatcaagagttgtgactcatttttgatatatcctgtggctgccaagtgattatggtccttccacaggaaggccagggctggagacacctatgggcaaataggtgggctttaaagttattgggctggaagaggtcacctctagagttagttccaatggaaaagactagggcccagaggtgggctatggagcagtaggagccagcgccgtgtccattgagggggaagaaaacccagccagtctggtgtttctggaaagcaatggaagaaattctagcaaggaaggtgtgatcagctgtgtcaattgctgccaagaagtcaggttaaaatgagactcagaattgatttttggtgacattagcacaaatcgtttctggggtaaagggtagtgatggggaaataaaaagtttgattagagtgcttggattttttgtgggaggtgagaaaaaacaggacactatgaatatagcacccttttctataaggggcaaagagatcagggaatatctgtcattttttaaagtggagaactctcacagcctgtttgtatgctgatgggaatgatgagagaggggtggagaagagctgtccatactagagagagagaggagacagtgtcctgaaatagggtgcatccatgggtctctggagctaggacagtcctccattataacaggagaaagtcagagaatatgtacagatttaggagtggtacagttttttctaggaaaaaactagagcgttttcattttatcactgtgcagggtattgttgctgtgttaagggattaaaaaaaatacacatgtcatagacagcagttaaatattcatttccttgcctcctcctacagtttagaagctttggccattttgtgttctgacagcaaaaataattagaatgggggaggtataaaagcaggtctcaatctgttctttcatttgttcattcctttattcattccttactttgtttacccagcaaaaatacctagtaaaaatatttcctcagcaaacatttttttgaatgtctattatatgcctagcacagtctgggtcctggaggtacagtagtgaagaaaccaagtctctgctatcatgaagcttatattcaaatttattccagacaaataaatatattttggttggcgttacgtgctataagggagaatcaagcaggagaaggtggtagaaagagatggtggaaaagaagaattttatttgtttatgtttgagtagggacctgagtacagttaggagccatttggcccccttgtggagggaactttttagacccaggacctgtgtacaatccccccgggggtcgaggagagggagagtgtatttggtgtgtttgaggagacaccagagtgactgaagctggatgagggagagaggagagttccagaagatgaaatctaagatggagcttgaggccaggctccagagagccttccagaaccaagtaagactcagaaaggtgggagagactggggggctttgcgcagaggagggacaggctgtgacttaagttctaaacgtatctcagtgtgtgggaactgatcctaagcttaacctctggcttttgatttcattctcatttctcagtggttgagggagatgatgttaccccgtgtgaattatattaactgatttcacatgcaagatcgtaaatactgagtcctttttcagagagtggacaaaatggtacctttctctgaagacattaattgaaagagtattactttccccagagaacgtattccaggtgtctctggttgtgtacacacacacacacacacacacacacgtgctgttgaattaatatagctgatgtttactaaagttacaaataacaaaaaattggaaatgatgaggtaataatataaatagaaatgccagtctttttttttttttttttttgcactctttgcatactccctgggtttgaccatgtctcctacttaggagactggtccagagccctgagaaattagttgcatttattactttttgactattttttttaaattaaaaaaagaggtcagaaattggtaaaagttcaaactacactaaaatgttatataatgaaaagtaggttttacttcccccttatgccccccagactgttccctagagccaattattttgaacagttttgtatgtcctcgaaatagtccccgtatgttcaagaatatatatttatatttttgtccccttatacaaatcacagcatattaaagaaactgatctgcacctttaaaatgttcctttgaacatctttgcacatgtgtgtttcaaaatttaattgccccccaacttgattgcatccgtttgcattcccagcaatggtggaacatgaattgcctgtaatttctacaatttaatactgtgagttataattttctggctttaatctgtgctaatctgatagtaatctattattttaatttgcatttttcatgggtacaagccattgtatttattttcctaaatattgataatttataacctttgattatctagtgagttgttggccatttcttattttaaagtatttcagtgtataataattaaatatataattttttcatgtgttttgcaaatttttttatgtgctttgcaaatattttttcccatctcttcatttgtcgtttgattctgtttatgctgttcctccccctactccgtgcaaatatcttaaactgtatagtcagattcattgattgatggagtcagcgtctcactccatcaccccaggctggagtgcagtggcacgatctctggtcattgcaacctctgcctcctgggttcaagtgattctcctgcctcagcctctcgagtggctggaattacaggtgcccaccaccatgactggttaatttttgtacttctagtagagatggggtttcaccatgttggctgggctggtcctgaactcctggcctcaggtgatccacccaccttggcctcccaaagtgctgggattacaggggtgagccactgtgcccagccaaacatttttatttattaaccttggagtaagaaatgtctccctaaaccaatacaaaaccccttagccataaaaggcaatgaattataaatctgactataaggcaagggcgcggctcacgcctataatcccagtactttgggannnnnnnnnnnnnnnnnnnnnnnnnnnnnnnnnnnnnnnnnnnnnnnnnnnnnnnnnnnnnnnnnnnnnnnnnnnnnnnnnnnnnnnnnnnnnnnnnnnnnnnnnnnnnnnnnnnnnnnnnnnnnnnnnnnnnnnnnnnnnnnnnnnnnnnnnnnnnnnnnnnnnnnnnnnnnnnnnnnnnnnnnnnnnnnnnnnnnnnnnnnnnnnnnnnnnnnnncacagaaagaccttgtctcaaaaaaaaaaaaaaaattttttttttaaagtctcctactgcttttatggtagttgaactatttttatggtctttaactggaagttatgatacataccttcttgggtttgggggtcgtatttctacttaaataatttttgatccagtatacagaattattgaactcttaatataaatattatttcttaatcatagctgtgcatctgaattatccgaagagtgcttaattgttttcatttccacaaatattcagtctcaggcttcctaacccctattctgattctccaactctaaaggttggctcctttgtatgcatttagcaaaagcttcagatagcttatttgaagatatcttctccaaccctcaacccccacctccctgccctttctcaaaagggagatgttaggaatagttattagaatttcttgcgtgtgtgtgtgtgtgtgtgtgtgtgtgtgtgtgtgtgtgtgtgtgtattttaagggtttatttatagaaaaatcatcacagtattgctttaaatatgacttcattaaggtgtttcacaggtggttaattagtgtacttggtcaaatgggaggcaaaaggactaatgatttgcagctccagccctaggaatatttacagccggtaaatacacttactgatgtttcccggaatcttagggcagaaacatccctgcacaaatgaattgcttaagtagtaaagatgagccatagctttgcttagttagccattttggtttagtagaatgtagataattgccatggaggcagggggaaacgttttgggagtgtataaagcatgaagttgtaagtattactgctataggtctgatctatgcaggtcatctcttctagtcagctgggcttcagaaaattgccatgttgctcttgtgctctcagtgtggaggtagccagtaagtcctgctgatgttggccacatgtggcctttaggtagattgttccctcctgcagaccttttactcttgatttctacctgggtcatgatccagggagagaagctctagaactgggaattgggggactggtcccacttgatgatttggctttgagttctttttttttttttttttttttttttttttttgagacagagtctcattctgtcgcccaggctggagtgcagtggtacgatctcggctcactgtaacctcggcttccttggttcaagcaattctcctgctacagccttccttccgagtagctgggatgacaggcgcccgccacctcgcctgggtaatttttgtatttttaaagtagagatggggtttcaccatgttggccaggctggtcttgaacccctgacctcagacgatccacccgcctcagcctcccaaagtgttgagattacaggcgtgagccactgtgcccggcctggctctgagttcttttatgacccttgggcaacagctactggctctgagccttagttgcttcttggttatgttgtctgactatctttactgttccaaaacagttgtaatttcccccatttctatttattgctctggaaacacatgtcgtttatctacacttttgctgttttgttctgtggtgtgtgagcgcatgtttcccctgccagcctggaacccctgagggcatggatgccatcttatttgtttttatctccccagcgcctagcactgagccctcttacaggaaatgctcagtcaatatttgttgaattggattctcttttagtagggttacagaggaaaaaagagccttaaaactgtctccatggggtccacatcttttgtcttttcttccatgtagagatcgttggcaaaaacattgatgggaattatctatcttgcatttatgtgacatttttaattctttaacagtattgtcatctgtataatcagttatattgcacctggtttccccagtttggtagagcatgcctattgagttttaaagaataaagatgacttattcagaagggtcatgctctcagaataacaaactgtcatggcatcctgtttgcaaaaatctgcattaggcagatttttgtctgatgatttctttgttatccacatgactttcagggctaaaatgaaatgctacttttttctttaagtcattattcaaaagtaagagagaagcgtttattataacatatagcttaggtgtgaccttgggaaagttgtttaaaccaagttaatgatttaatttgcggggtgggggtgggggagaagataaagaaaaaggaaaaaaaagccagcccaggagttgggagtgtaattagatattatgagctcaggcatgaatttggcccctttatctctgttgaaatttgtgtaagaacatgaagtgcggcccattctgacactttaatcataggtcattcatagccataattgttgttgaaaagaacagtggttggatttatttttacctggaagttgcccgttaaacacaacatgttattaaaatttatttttccaaaaagtatacttttcagtatacatttaacagattgaagctatacatgtttaccatgaaagtctgtttcacctgaatgaattccggtgttgctgtgttagatagctatagcatggttgtggtttttgtagagcctctactaagttttatatttcttaccattcacaatttttgccagaaaagtggtagaaaaaagaaacttcataatcagaaaggtgatagagaaacctcatagtcagatatattataaaagaagatgatgacacctattaacaagaaatctaacatcttttgtggtgagcttctaatacagtatcaacaaagcctaggaagagtttcctttttgagacaccccgcttgcccccaaatacattcgctcagataaattacttactgagaaggctatttcttttctaaaataaaaaatacaatgaataatttgtaatctctatacagtgcctggcatctagctgcccaaggaacatttgttgaattcagtagcaccttaaattatgtttaagtacttccaaagccatactcctgttggttgttttgttattgttgttgttgttgttttgacagacttcaacgatcataagagagtatgtcattgctctggctcacaggtgaagaaactgaggtttagaatgaatgcctgtgcttttagtctagcaaatgtttattgagtatgcattgtaatgaagaagaagcacagctcttgcccttgaatttgccactgggtcagttctcatctcctaggtaggttaggattttactgggcatgtatggactctctctccaggaaaaggaagagagaaagtacacaaacgcagaaacctttgcttctgtaattacaaggtttctgaggccccacaaatctttgaaccccagattaagaatctttgatccccacataaagaatctttgatttaaccattgcttgtcaacaagcccttgaattaagtaactgacttagggggcaaatagcttaactactgagaagcaataggaaccccatgcttctttttcctctcctaatgtttttcccaccaccccatgctgattttgaagtggtgaacaacaaatgaagtaacaggaaaacactttgtaaatatagtgttctacagatatgaatgcaaacaaatctgtaagtggcagggaaacccaggccacacatttcgcagtgtggcttatgttcatacattagggagcctgctggaaccccactaaactgttagttgccagctgtttggtttagtctgatcatttacaaaaatatagcaatcctcactggtgtgtgtgttaaatacagacatcactgaaacgaacgctgtgcctgtgacatacatttttgcaagtgctttctatgtatgggttgtcagagctagtttaattctaattgcagaaatatcagtgggatttatatctgtcttcttcaaatagttggaaagaaaaaatgtaagcacttggcacacattttgatttttgttctacattgaaaagaaccatgttaatttcaagaaactcattaatgtgcaggtccgtactagtagtttctcttagttacatattggtggaaggcagaagtattaaaaatggcatatatgtaatgagattttacaaaatttctgattttgagggtagagaaaaagccagtggatttcctattgtgcatgttaatttaaaaataatttaataatgactccatttgtttcattccagcattaaaaagggacatggagaaggcttgcctgtctttattcaccaaatagcggttttgcagacccttacaagttcccatatgctagtgaaaaacattttccaagaaattggcagcattgcactttgtagctgatgccagcttcttccttgggccaattcaacagagaagagaggaaaaaaaaatgccttgttttagtggctgaattactctgacaagctttcacatcgcccctcctcttattaatattctttttgatgtgagcttgtaaaacagaggattggctgttaatctccaagatctcaagggcttttggcagtggcccataattgatgtgttcacatggctgttgtctgactactaatgattagacagcagtgttatctaccagctaaatcagtgttgcttataaatcacacttgataaactgcagtttcatttcttcaaagagttcgtacaattctgcatactttgatggaagtgccagaggcatttcatgattctttgacagcttagattaggtttatttttcatttctgtttgacaaaatattagactttttaacgcatgtgaaagagaatttttttgttcccctaacaaggcatttaaagagtgctaagcagagaaagatgacctgctttcagtgggaagatgtacaagttgggatggcaggtcccagttttgcttttgctacctactccaaggtaaatggaatggggccatggcatctggtgccatgccactttgaaagaagaagagaagaggccaccagcaaggaagtttgcagaatgtgggcctgtgctcagattgtgacagggtggagtagtgagagagcaccaattgctcagccatgttatgtgttgagcccctgcgtcaaggtgtgattctgctttatagacaggcaagagaaagcaaaaaggatttataagaggaaaaggtgccagccataggattcattttcctccttcgctgcccctatagggacacttgcctggccacagacacacccagagtcccccatctgtccagaactctgtgtactgcagagatgaaaccaggttgcatgtcgcatgcacatggtgggctttgagaacttctgctaagttttgggtctttattggctacaaactcctgtggtcttgagttaactttcctcatttataaaactaaaacaacaacaaaaaaggactaaatgatatctaagctcattttattgctctttattttgcatgtccttggactgtattgtttcagagcctcaaaaaagcctttttgctaacattagttaatctttgcttaatttttgagatcaaatattagattgcaaagaaatggttaaatcagaatggtttgtgatttttaaaaaatgaatttatttatttatttatttaaggtggagtctcgctctgtcgcccaggctggagtgcagtggcgcaatcttggctcactgcaatttccgcctcttgggttcaagcaattctcctgcctcagcctccccagtagctgggattacaggtgcttgccaccatgcctggctaatttttttttttaatttttagtagagacagggtttctctatgttggccaggtgggtctcgaactcccgacctcaggtgattcgcccacctaggcctcccaaaatgctggggttacaggcatgagccattgctcctggccagcaaaaatgaattttaaaaatcacatttcttttaagagaagtttatataattttaaaatgtgtcagagggtaaatatttaatcaaaatttactttattttgagatggagttttgctgttgtcgcccagactggagtgcaatggtgtcatcttggctcactgcaacctccgtctcccaggttcaagtgattctcctgcctcagcctcctgagtagctgggattataggcatgcaccaccatggcccggctaattttgtatttttgtagagacggggtttctccaggttggtcaagctggtctccaactcccgacctcaggtgattcgcctgcctcggcctcccaaactgctggaattacaggcgtgagccaccatgcccggccaaaatgtacaacttttactcagaataaaattatgttctgtgaccaagattgggagtggggctaataataacttattaaagtttaaagagttattagagctctagaatgcaagaatgcaggagaatgcacttaacactaaagctacctgaaaaaatttcacctatcctaccctaccccactccaccaaaacaaaagtcatgtaagatttaactgagtacttccttttatatccagtacttttagaccttaaatctaggtggcaagtttatttcccaacttcctaagagtggctttgacatgagcactactttttcctagtatattttagggctgtaattaaaataagcactatagtcagggaataaatgtttattgataagtattaacattgatgaacaaaggtgcttaactaagctgcttatttaaatgacttgtggttgaaggaaatcccctctttttttttttattaaatgaaacaatttaaatttaagttgttttggttatggttattagattttaatgtgctatggaaaaatacccatgattaacttagagaagatagccattcagtgatttaaatagatgcttcatttagttttgatacgtaaagcaactatattagagtttctttcttttctttttttttttttttttttttgagacggattctcgctctgtcgcccaggctggagtgcagtggcgcgatctcggctcactgccagctccgcctcccgggttcaggccattctcctgcctcagcctccccagtagctgggactacaggtgcccgccaccacgcccggctaattttttgtatttttagtagagacagggtttcaccgtgttagccaggatggtctccatctcctgacctcgtgatccgcccgcctcggcctcccaaggtgctgggattacaggcgtgagccaccgcgcccagcctatattagagtaatgcagctataaaatatgagaaaaatgcattaaaagttatggagtatggttttcattacgtaagatatgtatgcataagtaagggctggttggtaatattaaaaataaaaataatgataacatttgaaaagattttttacaccacttaaaaataatattttctgtttaaaagcagtatacgtacatgtatctatgagctttatgaagtgtgtatattaccattatggcaaaaaataagcatgcattttttaattttagaagataatagtttttcttgactgatttaaatcatgattcaaatcaacttgatttaaatgtagtctagataatgctaaaactatattgcaggtgtttgtcaactagctagaaattattttaatggttaagggagtgcataatagaaataattattttgctgcagatatggcaagctctgtcacccgtggggtgcttgtacttggatattagacacatttgtaaaaataaataataaatattctggaaacgtgatgccaagagagcgtgatcctgtttaccacccctgctatccttcatttctttgtggcatcatttttttttgtgtgttaaagagtaaatgagctgacttggtaactgtgcaagaataaatggttaataacatttatttttatttacatttgggcattcttttgagaccattttcatagaggttgtttcatttaattcttgaagtacccctataaaatagctgaggaagcattttcatagagtccatttcatttgattcttgaagtacccctatgaaatagctgaagcaagcattcttaattcttatggatgttaacactagaagcagaagatcctgatctcattcttaggctgggatttctcctaggatgtcagcttttagaagaagaaaaatcactgttacctccaaataaaatcttactatgtagttggttctaaagaaccttaaatattcaattataaattcatccccaggtattttgaagtgtttcatttaatttgaaaactgtcatctggttttcagagactacagcagtatgtttttaatgtgttggtttagccatgtgacaaattaagcaagccctatgaacatgtgttactgagattggtattggcaaggacaataataactaacatttgttgagcacttatatgatagagatactacgacgggctttatgtaggatctcttgtttgatatgtctattacattaaatacaattaggtaatactataatctccactttataggtgaggaaattgaggcttagaaaggttaagtaaattttcaagattatactagtaagtaaatgatctgagattgaagcacagagaccacactcctatttattacactatattacccagttcaaaagcattagtgagacatgtgatgtgtgacattgacctgtcatcctctgtgagaagtagcttctgggactgatggtcttagttgtgcatccatgactagacttctggatgaaagaactccaagtttctaggagggcttgtttcatttctagtcctcaacagaatgtgtttgagaacttgattttttcatgtaattcattcacttatggggcaattaagataaaatatcctggttttcaaactgaaaatgttaccaaaaacacattgcaattacataggatggttgtttcttcttttgggaatagagacgtatcatagattgacaatgttgttttttttaaaaaagtttacttctttgtcagctccgtgaagggagggatcttgtctgtcttggttgtcattagcacccagcacaatggctggtataataaaaagatgttcaataaatatttaatgttttatgttatgactgcttaagttagaactggaatgtggctcctcatatctcttttggtttatgactcctaggtttttttaagagagttaggtagtagtaggtacatttattattatttttcattcagagatggatctatatgtttacttttaaaatctcctacacttctgtccactccctacttcctttttcacttccttcctgccctgttccaacatactgttaacttcccctccccctctccaccaacagatattaacgtccaagagtgaacctaaatgagctcttgaattcagtagagcaaggattggcaaattttttctgtaaatggctgatagtaaatactttaggctttgcaggccaagaggcaacatcacggatattatgtaggcacttggataacaagagagaaaacaaatttccacagaattttttaattgacaaaatttaaaatccaatgacaattattgagcacaatttttggtaatacagatctactgatgagaagtatgaaattctttttgtgggagagaataacattccacttaataagtgttcaaagttaatgtttgctgtcattacattgactgcaaaaattcatctgtagaaaacattcttagctttcaggccttaggaaaacagacagtgggccagatttggaccgtgggccatcatttggtgaccttttaactagactgtggactgagaaatccctaagcagggttacttgccctggatattccttctcataaaggctcattgctctaagactggaaagggaagatgttcaaatgggatttgtagggtggaaccaccttagggaactagtgaacataaagatagaagagtagtaagagagaagggaaggagagagagtttctctctgttcagggaccagtggtgattaaggggcatgtgccttggacgtcatgctgggaaggcccgaatcaggtggtgggtggggatagaggtttgaaaaagcttatttaggatccccattacttttgttatttagcttcctgaaatgaagggctcattatcttggccatcagtgacatacaaagattaagggacatggcatttgggatgggatctggtttctcaaagatcatgagtcatctaatggaaaaataggtgacttgcagcatggtgtggagtcattttttcacctaaattgaaacaaaaaggttccaggttggtgtaggggcaacactgtgaggctgccagtggctgtnnnnnnnnnnnnnnnnnnnnnnnnnnnnnnnnnnnnnnnnnnnnnnnnnnnnnnnnnnnnnnnnnnnnnnnnnnnnnnnnnnnnnnnnnnnnnnnnnnnnnnnnnnnnnnnnnnnnnnnnnnnnnnnnnnnnnnnnnnnnnnnnnnnnnnnnnnnnnnnnnnnnnnnnnnnnnnnnnnnnnnnnnnnnnnnnnnnnnnnnnnnnnnnnnnnnnnnnnnnnnnnnnnnnnnnnnnnnnnnnnnnnnnnnnnnnnnnnnnnnnnnnnnnnnnnnnnnnnnnnnnnnnnnnnnnnnnnnnnnnnnnnnnnnnnnnnnnnnnnnnnnnnnnnnnnnnnnnnnnnggttttggcccttctctttacattctttgcattttccctgagccaactcagccactccactggcttcattactttctttctgccaggggtcacagagatgatctagaatgatctaattctgtccattcgcctgatagacgttgcccaacaggcgatcctctgcccatcctccccatcccaggccatgacactgtcaccaactgaaacagaccgctggggcacatcttgagtttgtcctcttctgccaccttcccgagtctgatctctcctccctatccccccaccccaccacgggtgccaggtcttcttggagtactgcaatggcttctttttttatgttttgtgatggagtctggctttgttgcccgggctggagtgcaatggtgcgatctcagctcactgcaacctctgcctcctgggttcaagtgattctcctgcctcagcctcccgagtacctgggattataggcacacacctacacccggctaattggtaatggtttcttgtcttccttcctccagtcttgccctgtctcatctgttttcccatggcttccagtgtgctttttaccacattaacaatcgaatccttccgtgcccctactttaaaatcctcagtgcccacttccaacttcataataaccccccagattcttagcctggcctgggctcttgtgaattctctgatattccagcctcagctctccctgtccctgccccacccccttggtgctcccacaatgccctgggcttaactgaccaccttcagctctgaccacatttggctctgcggccactgctcatctccccacctttggcacattgtggcacctggcaaaaacttgttggatgaaggaatgacttccccaacagtgaggcggcttaaacggcaacccatctaaaggggagggcctggggttaatacatgattcctgtcacacaaactaggtccttatgccaccttggactcacttgtggatttcaggacctctgcatgaggagttgaaataatagtcttcaagcatctaccctctcctctctgctttacttttactctaaagtggaatgccttagcatcttttcattaaaaagttagtttaaaaaatggtaaaatagtatatggtcatgtcaaaatttaagcagcatagaaggctataaaatgaaaagtgattccttcttcctctgtatgtttctatatgtataaaatttctgaaagaacacacaagaaactgttagaagagaggttctctctggagagtgatctgttgacttttattaataaaatctgctgtgttctcaaggtggggaaaccgaattctggacctgtgagcaagcagcttttttttgtgtaggcctctgtgagaagaaacttttaaaagtggtttatggtttagaacttggtagggggcatgatagacctcattgggacaggctgtggcctcttgtttttgctcctgaccctgagaagtaacttatctcttaagactaagtttcttcagtttacacaatcagatgagaaaacccacccttgcctttctctagagctgtagtaaaaatgaatgtttctttaaagagtccttgacaatagatatgtagctaagtattacatatggatggaaataccatatacatgcatgtatagagatggtgtatggggaagctttgtcatgttctctctaaccattccatctctgtgataaagtatggagagctttacccagttgcttaactgtgattcagaatgaaatcacattttcaaaactttgcttaatttattaaaattgatcagtgttttggatcaacatttgggaggtatggaaagaagaggcaggagacatacataagaagcttcttggacatatgttgaatatatgtgagcaatattcagattttgcagggaggaaagtgagtggtaccaagatagtgtcctgtacagggagtcaaaattgtcttcttctgtagccgacccacgatgctttgggtgcttctgtggccttccctttacatggatctcagctcaccgcatagctttatacaccacatagctcccatacagtgtgactcaggcacttccttgtcatttaatttgttatgaccagcatgttttgagtttgtaattcaaatgtgtaaaattttagttgaaaatactccttttaggtggttgcaagtgagattccctaaaagaaggtaagaaaaatgactgatgttaagctgagagaaatcggaatacggtggtttccaaaatgggcttttctttcctttcttcctgcctttctttcttcttaaaatcatgtctgcatccagaagcataaggatgagagacttctaacctttccctgatttcaacctaatttcaaggagaaataagggtcacacaaggacaatgtatttatcaatgaccaatatcaactaagatacatgcattattcatgtgttttgaaattgatttattggctaatgtaggcgcaaccatgtttagcaacatccagaatttaccactgaactttctttttaaaaactttcacttttaagggattgggaacaagatctaattgatagaaatggaatttgcatggaacttttcaggaattcagctttgtacaaagggccttgtgcaaaggattaatccaagaacacaggcttttttagtgcctttacgatggtctcctttctttgtggcttatttttgtgctttaagtgtctttggaaatgggatgagaggaaatcagagaactcttatgaacaagatatgaaaacactgatcatttactgccactatttaaagcacacacagctctctgagcagtgaaagatgtcagcggcacttttgaaacagattaagtatctgtggctcagcagtaggacaggttttcaaagaacacaactgaggctaagtatgtgacaactgatgtggtgtggnnnnnnnnnnnnnnnnnnnntatggaactctacacagttcaaggcctttgagggaggaatttaatttggcttcataacaaagaaatttaagacattgagtagagtagtttaattatattccatctttacatactcagtaccttctgttttgctttgaaaactgtcatggctagagaatgaagttaaaaatagtcactgctgtttaaagcgtattttacacatgtagctgtgtacattctcttgctttgtgacctgcatatagggatccttctggcagtcagacacgaagagtcagtgaccccctttcctctccaccccaaagcagtaccatgcagaacccagattttttttttttttttttttttttttttttttgagacagagtctctctctgttgcccaggctggagggcaatggtgcagtctcggcccactgcaatctccgcctcctgggttcaagcaattctcctgcctcagcctcccgagtagctgggattacaggagccgctaccacgcccagctaatttttgtatttttagtagagactgggtttttccatgttggtcaggctggtcttgaactcctgaccacaggtgatctacccgccttggcctcccaaagtgctgggattacaggcgtgagccactgcaccgggccttggatttttggcattctggaattttggcatggtgggggttctggctggaggtggaagcatccgtcttggccccactggccttggggccagagccctggtccatccccaggccaagtcctaccagatcagctgctaagcctgaacagcacttgagggcagggttggtcttcatacctgataatgagaaagtggaaatggcaatataattcccagtctgtgcataacggtagttttagaattggatgatttaaaacaacaacaataaaacaaaagctgagctttggtttcagtaaggttttaaagtgaggtttctgaagggattgtattatttgcttgcaagcctgagattcactattctgaactatgggtaataaagggtgattcaggtatattgcttccaacatacagaaaagggccagaaattacccatggagaaagatttctttccatctcatcttctattttacatttagaagggtttgcgtttgatgttagaccaatgtggggtcaaattctggctcagccaccgaccctgagtgaccttttaagttacttaacttttcccacgtttccttttcctcatctgtaaaatacttcccttaacaattttgtaaagatcaaaagagagaatgcacagtataatccctcctacactatatgtggtaagacagttataattcctctatgttgtatgtgttaaaaagtagctgctgatgttactatttttatgagaaagcccatggactttaagatcagagagctttggtcttgaatttcagctccttagataaagtggcccatcctctgagatcttcagtttctgcttctataaaacaggaatgttgtgagaattaaaggaggcggaaaaagtctggtaccttagaccctttgtgagaatttgcccatgttgttttctcagcaagctgcaaagcgtaaattgctttgatcatggttctgaaaggaagagttgtctccatcacatttacgaaaaggcagaattagaagtgaccaaaattcagttgttacaggtttgtcctttagggatggaaattcagcctcaatgattagttctggagaaaagatcagtgcctaatttaaggaaatggtttttaaagcttcccctgctttgctaaagaagcagtgacgtcaggcagaaaaagggtggttaaaatgcaaagtaagagactgcagcagtggtcgcctctaaagagctgtgatttcccctacgtagtagtggagtctctttctaatgctttttaaatgaagaggtgactatgggcaatctcataaaacagcccaataccaggatatggagaaaacgtgaacattaagtaatcgtgccccagcattctcatagactataacaatattggctctgagcaaagtaaaacaccattccccctctggttgttggtgatcccgggattgaggggttaatagcaggatcggtgtggatatttttggcaatagacgtgagaaagctgtggcaagcttccctgtcagggtttagacctgatcccaggtaaaggagggaatctctctgccttctggaggcttgcttctcggcagtcctgggtttcgccttctccttctacctggcagcagagccacctgaatgtctctttgttgggtctgggtggagcaggagtgctcgagggagcactctccagccctaccctggccacctatcctcactggctgtcggtttcctggtactgaaagcatcactgaccaacacagtgaaatgccccagtgatgaaaagctgtccccaccaacactccagctttggatccttccttgcccatcagcactcaggaagcccttgaaagaaggtgaacggagaaaatattgccagggtttccctgcagattgcccgcccccaacccagccctctgattacacacactaagtgccgctctctgtgtaaataaccttttcttccctgcctcccttcagcctccctgctccccctcccatgctcttaggctctctcgcgtgataaatagccaggctactgctcagcatgcactaacacctgggaataatcatgcaaaaataacagtgagagactgccgcgcgtctgttcttgacattaactttcctcggtttgacaggctgccaccaccagctgttagacttatgggtcttttttttccagtggagatggctgctttcctgctttcctctttttttgggttctaataggttacatcagtgtcctatcaagatgacagaaaagagctttgacaaagaaaccattgctaaaacaggccagttctctattctgatattttattccagttgttagtattattagactaataatcccccactgatttttaaatgaggaatatctgattagaactatattagtgtttctcccctcagaaagggatttgttgttgcctcttgtgaattgcctttgaatgtagcaaatactagcatttggtcccatagggccaaaccacctatcgatttcaggtctcagatatatttgtaataatgatactaatattgacaatagcaatagcccctgtttattgagtgctaccttctaccaggccctgagctaaagttatttgtatgatcttctgtagtagtcacatgagccagatgttatttccgttttacagatgaaggcactgattccccagagcgatcaaactacttgcttaaggttttgtagctaacagtagagctggattccaacccccagtgaagacagatccctgccccaccctgtcttccattaacacgctactttttgctctcaggccaccatgaaagttcctttggttgtagttctacaattatccttgtaattttgctatatttgtatgattatctgaccagtgtcacagtcttgcccactacacagtcagtccagaagggcagggacctggtctgtttgggccactcttgttctagcaggttgcacggtgcctggcaaatggcaggtgtgtagtaattattgggtggatgtgtgataagagttgaggtgagctgactgttagggcagcagtgcatgagaaaaagctgcaactagagattaggaggaggagattctgtagtagtacgggactcatcagggccttcatggtgatcccatcattgccataaaattgtaaaatggaggtgggttaagccagttgactgctgccagatgtcagtgtatgaaagaagcagtatttccccaggctgagcttctcaaggttaagccccctttcttgtatttttaacatactttaattgcacttaaccatgcatttggaggggattatagatttatgttaaatatagtaggatataaaaaggagctttggaaggttgggtgcagggttagggaactataatatcagaccagggacttttaagccagtgtttactgacctaagcactatgctgagcattcactttgcacggattatctcactgagtcttcactgcaacgcttgtgggggtaattgttattattactcccatttcttagaactagacactgagtcttagagaagagaagcgcggtaacttgctcagggttccacacagcaagtactgacagggtcagcatttgaacccaattctgtctgctaacagaaccagaggttcaagtcctggtatgctgcctcctcactggagggagtccttgtggaaactgttgccaccctctgccttaatgaccttcattggctgaagaaattatggttcagtgtatggatcactgacctgagaaaccagggtgcagtggagttgatcttttgtataaggcaaaaataactactgaaaatgctttaaaatcctgctttacatatgatacatgtgacttcacgtttgacactgagatacacaagagaactgaaaccttttggggggaaattcttacctagcagaaagaattggccacactctttgaattacttcccttccacccttcttctgtttcccagtgtatgttgaactcctgtcaattttctgcttgtgggatgccatcgttttatgtgtacctaggctgccactagagacagcttattacacttgtacaaatatgggccacagttttctctcgactgagtaggttgggctaggcgacattctgtgattgtttcaggcagagggtggaagcacaaactccagcattctctggttgggcaagtcacgtggcaaggctgcagtgaagctcagttctgtcagttgatgccatgaggaatgtgggcccaggagagcacataatccaataattattttacgaaataggagaaatttaaattctttcctaatttattaaagtgttgctaaaaaaaactggaatgttttaaaaagtaacatacctgccaaataaaaacacctctgggagtggctgtaatccccacctgcaaatcctgttcttgctggcgacctctaaggaagaggggcctatggtagaccacacggggagactttgtgctccacctcctccccaatcccgacatctcacagtgaatggggagaaactgcgattctcctctcatttggttctcctctcactggtagtgctggtctggtacctatgggagtggcagttctgagccaccatgagaagccgatactacagtgaagaaacgaagaaattcacttgtgcaagtcaaagatgtgaacctcaaaacaatagtaactgtcaggtttaagccttaaaagccttaaatagtctaaagactattatcacatcggagtgctatttatgattaagtgtatatttatagtcaaactctctgaaccttagctttctcattttaaaacatgttgaactggactcaaaagttcttgctataaatatcagttcaactttcatgttacatttgaattgtgttaatggtaacaaacacaattaacttacaagtaggcccagagtactctggcttctcccctcaaggcatccagattccatagaaatttgaacttggaaattacataaatatgagagagagagagaggggtgtgtgtgtgtttctgcatgcaaatatatctatagatggagttatgttgaaataaggatttagtctagaagctgttgtgataggatatgtcatcaatattaggcggctgaaaagtgcatttgttgttgctgttgttgttgtttttaagggacaggggcttgctttgttgcccaggctgtagcgccatggcatgatcatagctcactgctgccttgaattcttgggctcagttgttcctcccacctcagcctctcgagtatctgggactactcgcatgccaccatgcctggctaatttttaaatacttttttatagggatgggggtcttgctgtgttgctcaggctggtctccaactcccagcctgaagtgatactccttcttggagctcccacaatgttgggattacaagtgtgagccactacacctggccaggaatgtgttttctagttgaggaaaatgggcctcagagaggttgaatgactctccagggtcataagctagttaatatcagagttggcgccaatcctagtgttagtatgtcttgccaccataactgtcattgccccattgtgttctcacctccaaatcagagaactgatacgctataagactcatctctaattttatttcattttcctatgcatcctattcaagctacgtttgttctcttggtattaatgtaggctgttgatcaggtgatgtgaagaatattttcagaataatgttctattttttcttttcaatttatacatgtgacatcgaattgcagtcagtttacaactaactatacaaattaagaagctggaaagcatgcaaaaaaaaaaccactggtttataattttctttggtctttacttttaattctggaaagtgattctaatctcagacagtcttttagttgtaataaagactactaggtagcattgttttttttccccccttaaatttcctctctcagaacccctttgttcatttgtcagctcagttttaaaataagaactatcagtgtgaactttgatccacattaagctacatttacacaaaagcataaatcacagtatctggggtttggggctgttaaatgcttttctttcctgggctctgtgatcaagaatgcagaacaataaaaagcgtggagcaaaagaagttttatggcagctttgagagcaggaaattaagtttttttaacatgcagatgggtgaaaggctgttctgttgcatcttggatcactcaggcaagtgaacgtcagtttatcattttagtgaaatgcaaactgtagaaatagttcctacagtcatatgaacaaggagcccacacagatgactgcttcagctgtttaactaggagcacacttcctcatatgactcttgaaatacactctttttgttttgtttcttttcaaaaaaaaaaaccaaaacccaacaaagactatatactattacgcctgcagccaagtggctacaaaagataacttacagtggataactgggaatctatgaacagcagaataagataatattttaccagaatgatcttcgatgcgccctttttacatataggatttgttagcccaactgataatacatgcaaggtgtcatcccttaaatgtaggccgtttctatgtgcaacacaaagacataggtaatctggagtcttggtacaaatgggctttgtgtgtggcattttcacaaccaataatcagggtcaaagctatctgtagcagtcctagcagttgttacaatgggccaaatgaatgtactgtttagtacatggcatagcctttggtttcattatggccagacttttaaactttttgtgatgaagaactcttttgctgctctcctggggatagcggtgcaaaggggatgccattgcaccacaagatcttgtagttggctgcgatttacatttcctgtatttagagaggtggtgactgagccttaatcaaactcattagggatctttaccagtttaaccacggaagaatttgtgcattggaaaaactcaagttatgttgatgttgggcacatgcatttatctccccccttatatgaattctgctaaactttgcaatagaatgcttaattaggagttgatgcttaatacatgctaacaatatccagtttttgtgtttcggtgtagattgtaaagtttatgtatttatatattcagcaaagctaatatattttagtagtgatttaattcattatggtttataaagttctttgaaaacaattttatttcatctcttatacttaaatttttagtgtttactggagtttctcctttagaaactgttataatttttaaagtgagatttcattacatgtgagaagtagccttaattttgcaaaacatgtttcattcacgtctgctgaggctaacggctgtccaatgatgaatttagaaggagaaggacactgaaaacctgcttatgattcagggagctagcgctctcatgtttagcttatttggcatgaaaaaacaaaatgctcatttctattctcctttatattttggcaccattaaaacactcaaagcatattataattgcaaatggaatttggaatggtgatatattctagaagtgatataagcaaattgcattaaaaggaattcacggaatgcagcactactgcagtaagcctgtctgtctttcaggttgaccccctgtttacagtgccagcgccaccaccgccgatttccagcagtctcacgcctcagattctaccctcctacttttccccatcttcatccaatattgcagcaccggttgaacagcttttggttcggactcgttctgtgggtgtcaatacatgtgaagttggagtagtgacagagccagagtgtcttgggccctgtgaacctgggaccagtgtgaatttggaagggatcgtgtggcatgaaacagaagaaggtaaatacaatttatttttatatatttcccgatgccctcttccccatgatgtatttatgtccacctgtgaggagaatttgttttgcggtattcagagaggaatggaaagtgttttttatttccgctctctggatttgtgttggaagtaagaaccgtgtttgtcttcttgtgcatggctgcttttaaattgcagatgagttgggtgtttctaaaagtgattctcctctttaagtgctaacatggaaggactgtgagaagcaggtgagggtttactcttcccctaaaaggtattgtggaaattaggaagggagatagatctcaagtttatttaattcttagggtgccaaccaatgtgtctgtcttgacatggttgtttttgtgttgtagaggcttatatttactttctgaattgagccaaggttcttgcacatagtgaggatcattgtcatgatgtggctgtggccagctggtgctcagaagtaatgaggccagggccaaagacttaagccctagtaagccggtcacttctcttctatggccagagacgtaaaaccttttctgttccttaactcggcaagccatttggcaaatgcaatccattagccacaagagaaacaaggttcaaaggaaatggatcaggattaatctatcattgctattggaatataaatcagagcatatgccatgctgatagtggatccaaatcatggttgaccatgtctcatagcacatgaccaccaggtatgaagtgtttcatatggccagtgtcactaacaagccaaccaataattgaaaactaactaccaagaagatctgtagtgctccattggggagtgagtagagtagaagagataaggaagaagcatgctccagggtgcttcagagtggaccagagaacaaagaaaaatgaaggggtgggggaacttttttttctctgtaagttagatcggtcaaagataagggagatgacagttgttgatatcatggtcatttgccagaggagtaagggcaggatgagggtaacaaaagggtctgagactcacaattattcatcagattcctctgaatcaagggagaaaaactgagggccgaaactcaaagggagaaggtgaaatgtattcaaaagtggctgagtggatggggaatattgagggtaattgctgggcaagaagtagttgagaaaaaatagttaaggatagtgacaaactgggaaatgaaagaagaagataaaaataaatgaaaatcagatgacaagtgttgagcataattcttaaaagatagaaaacagctcaagctgtttcaaggtagaaaacaaaggttgttagagaactctgaattctacatattacattaaatatactcttgtgcgatatgtttcgtagttaaataaaaatatttgtagatagcactggtaagtataaataaagacaatacacaagaaagaatcagagaaaaggactgaaagtagctatggtcagcttttgtttgctcagagggaagtgattaaaatttacttttttggctttagaaatttttgagttttgggtctcttctttcattttgtacttttaatttgggtttttcagatattctgggaagccatttgaaactatactgtggaaccacattgggaggaactgatgtaggaggagccagaatttgtctcatcttgcttgtctgttcagccaccctccagtacaaggggtcccatgtggggagcaagcttctatcatgttattctcttgggttgtgcagtttgccttcccttagattttctctaagggaaatggtggataaggcgttcagactgacactcagtgtgaaaagtataaaaaagtattgaagatcttaataaggtcacagtgaatttgtttaggtgcacattttcaggaacagaaaaatatttggaaagtgtaagggtaatttccctaaacttgaacatcagatttttttgtacttggataatttactcattagcgtgaaatgctgtcttcccatttcttagctatgacttagcactcccatcagtttattgcttgtcatgattttatttattcaagtgtggagtaggactaagtccctgcagtgtgacctcactgggtggtagatgttataaaattagccacaaactttctggaacagctgtaaagcttgggttatttttcactttgcttagaagtctgcttagttttgacttttaaccttagcctcttctcaaagataagattatttaggaaaaaaatctgggtttaaaaactatagcagtacataagttggtgtggaattctgggcatatgcttaaagagctgtaaggtattattactgttgttattatttgatagtgatatacataaagcctcaccagttccactctgtcctctgaaaaactggtctcctgagtccaactgcctttatacgtgctctgttccatccatttctgtggatatctttgtacattcgtacagcggactgatagctttagaaggttttcaggctgttggcagccccagccttctctttactgcctcacattttccaggatttggaatgtgtggatgtttactgtggtgacaagaaggagctggagctgttaatagagttattcttgctgaataaactaaacttctgacctccaaagaatttaagaactcatcttagtaaaggcctgggtcataagatgtatgtttaatgtgcaaccatttgcaagagcgttccatttgcatttttctcactatagtgtgtttaaagctcttgtaccaatttaaaaattaaacccacttgaccattaattttttccttttgggagaaacaaagagagacacagaacaaacacattgggagccagttatttggcagagctgaaagagagggattccaggagaaggggaggggagagtaagctacaatagttttgtagtgtgaggtttcactaacaaagagcttcaagttgagcatttataaaactgtcaggtgcctttgactaatgtcctgtagatggagttgaataaaaccccgtccctggtattttcacttggagagagagtattgtgtaactggtagtgttttccacaaacctaatttgttacgtgcgttcatatgtctgtgaaggtcatatatgtgtgtgtgttttaagatcctagaattttaagagttcatgcctgcactctttggggggaatattgaatattactgtgatttatttggatggttgggaatcgcaagactggactaggaggatccccattcaatacttaattgtttcttgtgtttggagtttctcattagaggaggattcttttagtcagtctttcccctagtgttactgccagtacatgaagtactggttgtctaagaaccaagttgtgctcaggaataaagtgttactagtgaagttccctctggaaaaaattagtgggtttcagatcatgcctaataggagagaaaaactattactgcatttggatgtttggtaattctactctgatcttttttctttaaggtaaatgcataggaccaatgatgtatggtacaaaattactcacagatgttggaaagaatttccttagcatttattcctgccatttgggacacatatgcctctgtatagtcatttgtttgaaaatttgctctttaaaaaaaaaataacaaaacaaaccagaaaaaacatggtgtatatagcaatatgtgtaaatacatatgtgctgaacttggctttttagcctttatgaatgtgtttccttttgatttttattgaatcatgtttcttattggctttttttttttttttggccttacctgagaacatacttggtttagctgcatctgtcgccgttattccgaccgttatttactactgctctgccactctatcattcacgacgcttttactttcttactggttaagtaaagccatgaagaaaagaaagtgagagaaagaaaagtggtacttgccaaagagggttctcggtgctgtgcctttgaatcaccttgggagcttttaaaacccactaatgcccaggcaccaccccaggcatttgtttagtctgggttggcattttggtctggtttggtattggtgttttgtcaaagctccctaggtgattctaatgtgcaaacaaggttgagaaccactgtctcatggcaaagagttgatgtcttagccctttgcaagttccttgactttttctctgtaaggaagacacatgtattattgcttcactttcccaggtataaaatggacatagggacacccgtcctacttacctcacagagcagatagtgtctatcaagatgctatggcaggtgagcagggttgtttaatcactgtgctgatgaggaagagggtctggctttgctcctcaacatgaactccacagaggatttaagaggcttaacaaacaactggtagtaccactcttcctaatttattgatatgggaagagtggaccctactgttgatttctcaagtgagtccaatgcaatacttctatttctgtgtggcctctgctgaattattttttagatgactcagaaccccatagtattaaggaaagttgttaatgtagcaaatatagaatgtgctgagagaatcagagtttttggcgggcaatgaaaatacaaagggcaacttatgatagtgactaccattttaatgagaagactcagcacctggtgtgagaggatgaatgcttgtttgtatgaggaccttcttcacctgatgcatttttcaaggaaggaaactgattttgggaatccgtgttttcagggtagttaattggagaaagaaatgattctctctctctctttttttccttttttttttttcttgagacggagtttcactcttgttgcccaggctggagtgcagtggcatgatctttgcccactgcaacctccacctcccgggttcaagcaattctcctgcctcagcctcctgagtagctgggattacaggcatgcgccaccacacctcgataatttttgtatttttagtagagacggggtttctccatgttggtcaggctggtctcgaactcctgacctcaggtgatccacccgccttggcctaccaaagtgctgggattacaggcgtgagccaccccgcccggccgaaatgattctcttttaaatcaccagagatgttctaaaattcttctgcttctcctatatctccaaagtcataaagatgatagtatttaaatgtgcaatgtaggaggaggttcaagctaattctttttttttttgagacagggtctcagttcatcgctcaggctggagtgcagttgttgtgatcatggctcactatagccttgatctcctgggctcaggtggtcctcccacctcagcctcccaaatagctgggaccacaggtgcataccaccacaccagctcattttttttgtattttttgtagacacgaggttttgccatgttgcccatgctagtctcgaacccctgggctcaagcaatccacctgccttggcctcccaaagtgctgggattatagtgaggtatctcactcagcctcaagctaattatttaaaaggcaaatgatcctatgtaatggaaaatgaatctgtggtattgttattctcattctgcagtattacttgccaatcttactactgaaaatagaacttttcttttgaaattctgattaatttgaggtgagattaaacattaatccaggcttgctttgtattttcagtaacagcatggagttggtacagtactttacagagtgaaatattatttattgaggtatatcatagtgactttatcaattcaactttgactctcaagaggaataagatgtctgtatttcgttacccctatccaagtcagtggcgattataacagtgcagtaatggggaacttgagatgtctagtgggcatgcttcttatgactcctgcgctaaatggagataaatcagcccccaatgtgtgagttgggcaggtgagcatggttgtttaattaccatgctaatgagaaaaagggtcaagtggtgagcctcaacatgaactctacagaagttctgaggggctggaagaactactagttagtgccactctgtattggctgtgaactttcccctcggcttcctgggccatcttgccatggaagttgtcagtgaaagtgtggatggttcccgtcattctgagcaaactgtcgcaaggacagaaaaccaaacaccgcatgttctcactcataggtgggaattgaacaatgaggacacttggacacaggatggggaacatcacacacccaggcnnnnnnnnnnnnnnnnnnnnnnnnnnnnnnnnnnnnnnnnnnnnnnnnnnnnnnnnnnnnnnnnnnnnnnnnnnnnnnnnnnnnnnnnnnnnnnnnnnnnnnnnnnnnnnnnnnnnnnnnnnnnnnnnnnnnnnnnnnnnnnnnnnnnnnnnnnnnnnnnnnnnnnnnnnnnnnnnnnnnnnnnnnnnnnnnnnnnnnnnnnnnnnnnnnnnnnnnnnnnnnnnnnnnnnnnnnnnnnnnnnnnnnnnnnnnnnnnnnnnnnnnnnnnnnnnnnnnnnnnnnnnnnnnnnnnnnnnnnnnnnnnnnnnnnnnnnnnnnnnnnnnnnnnnnnnnnnnnnnnnnnnnnnnnnnnnnnnnnnnnnnnnnnnnnnnnnnnnnnnnnnnnnnnnnnnnnnnnnnnnnnnnnnnnnnnnnnnnnnnnnnnnnnnnnnnnnnnnnnnnnnnnnnnnnnnnnnnnnnnnnnnnnnnnnnnnnnnnnnnnnnnnnnnnnnnnnnnnnnnnnnnnnnnnnnnnnnnnnnnnnnnnnnnnnnnnnnnnnnnnnnnnnnnnnnnnnnnnnnnnnnnnnnnnnnnnnnnnnnnnnnnnnnnnnnnnnnnnnnnnnnnnnnnnnnnnnnnnnnnnnnnnnnnnnnnnnnnnnnnnnnnnnnnnnnnnnnnnnnnnnnnnnnnnnnnnnnnnnnnnnnnnnnnnnnnnnnnnnnnnnnnnnnnnnnnnnnnnnnnnnnnnnnnnnnnnnnnnnnnnnnnnnnnnnnnnnnnnnnnnnnnnnnnnnnnnnnnnnnnnnnnnnnnnnnnnnnnnnnnnnnnnnnnnnnnnnnnnnnnnnnnnnnnnnnnnnnnnnnnnnnnnnnnnnnnnnnnnnnnnnnnnnnnnnnnnnnnnnnnnnnnnnnnnnnnnnnnnnnnnnnnnnnnnnnnnnnnnnnnnnnnnnnnnnnnnnnnnnnnnnnnnnnnnnnnnnnnnnnnnnnnnnnnnnnnnnnnnnnnnnnnnnnnnnnnnnnnnnnnnnnnnnnnnnnnnnnnnnnnnnnnnnnnnnnnnnnnnnnnnnnnnnnnnnnnnnnnnnnnnnnnnnnnnnnnnnnnnnnnnnnnnnnnnnnnnnnnnnnnnnnnnnnntcaaatatttgttttttggtgtcatttgtgtatatattttcgtggtgacattaggtgctaagtaatgaaccaataggtttaaaactcactgtgtaaagacattgttacctctttttttgtgttggttgatattgtagccaggtttattattatatgtgaatatataatggaaaactttaaaactttttttcttaggacttagttatagtaaaagatgtaagcgctatcttgtaatatttgtgtgtatatgtggtattgttctgctttttaatcttcttcctgtaaagaaggaattagtaagaaaatcttgagtgtcttaatattatagtgactgagctgaagatgtattttctaattacaaaatggagatggtctcattggctgcaaagaatagcttgtaatcataggtaggcatttgattaaagtattccactgacatttaaaaaataagttctcacagcagctttattgagatataattcacataacttaaaatctacgcacttaaggtgtataattcagtgtttttttctgtgtgtattcagaggtgtaccaccatcaccgcaattcatttcagaacattttttatcaccctagaggaaaccctgtaaccctcaacagtcattaccacttactccaatccccccattttgttgacttttacatcattgtccttgattctttgttgtttttatgtgtaaacatgtatgttttgtagacaatagaagggactagcttgttgagtacttactttgtgccaggcattgtgctaggcatgcttgtcaggtcatgatttcctttaatcctcagaaaaaaagccaaaataagcccactgtcattatctatattttaataaaggagacttagaaagggattcatctgtgccaggcagcacacctggcaagtgggggagagtctgaatttgaacacactgtggttggactttcagagcccttgctcttcatacaattcctgggtgttctggatttctgtctaccccttcacaaaagttcctgtctattttacaaagtgctctttggaaagggagtcaaatgtgatgtaataactggagtttatttttaaacatggaatgataggaatttctttataattctagcatctgattttggcagtagtatttgaatcagcttcagctgggttgatgtatacaaaccatcattttcagccccactatgctgtgagcttcttaagtgcacaaattccatctgttttgttcactgttggatccccagcgcctggcacagagtcagtgcgccatacatatttgttgaatgttgaataaattcgtggaacaaagtgatatggtcttgatacctgtttgagtagtgtagctttctagtcaggaatatgctacttttaaattaagtttggtctagacaattgaaaatagagaaatctactttgtcactgatttttaaaaatccattataaaatctcattacattttattatatttcagcttccaaccttgttattgtaagattaatctgcacaaggaaggaggaacaaaatatttgacatactttttccctcaaatcattcatatcctcaatacggtttttatttttcaattataaaaggaatacatgccattttaggagatttgggaagaaaagtaaaaatgtagatgggaaaaaactctataatctcacaatttaggtgaccacttcatatgttagttcattttcttgatttttttttttattcttaaccataggtaccgtgttgtactgcagatctctagaacttagttatcttgaacaactaaaactttatacctattgagcagcaatttcccctttttcccaccgacagttgctggtaaccaccattccactctgcttctgccttggccaactactttagatacatcatatatgtgtaataattatgtgactggctcatttcacttgatgtaatatccttaaggctcatgcatggtgtcacatatgataggatgtccttttgacatgctgaataatattccagtgtgtgtatattccgcattttctttattcacccattgatggacacttaggttgctttcatatgttggctattgtgaataatgctgtgatgaacatgggaatacagacatctcttcaagatcctgatttcagtttggataaataactcagaagtggaattgttatcttttgattttttaaataatggctatcctaacaggtatgagatggtgtctcatggttttgattgcatttcctttgtggatagtgatgctgagcactgagcatcttcacacatacttgttggccatttgtgtatctcctctggagaaaagtctattcaagggttcccccagccctcaccttttttttttgttttgtttttgttttttaaataaaagagacagggtcttgctatgtcacccagcctggagtgcagcctcaaactcctgggctcaagtgatccttctgcctcagtctcccaggtagctgggatgggcctacagatgtgtgccaccatacctggctgagacgggggtctcactatgttgtgcgggttggtgttgaactcctggcctcgagtgatcctaccatcttggcctcttgagttcctgggattatagcaaataacaaataacccaatgaaaaattgtgtaaaaaaagttgtgtaaaaaattttgcacacttttccattatttgtgtgtgtgtgtgtgtgtgtgtgtgtgtgtgtgtgtttttctgttgctttgaaggagtccctgttttggatattaaccttttgtcagaaacagagtttataaatattttttcattctttttccttttactctgttcattgtttcctttactctgtggaatctttttagttacatgttacttgttagttacttggcgatttttgcttttgttgcctttgtcttagtgtctttagttcagatcattcagtggataaggtttttttttttgtgtttttgtagagatggggtctcaccatgttgcccaggctggtcttcaactcctgggttcaagcgatcttcctgccttggcctcccaaagtgctgcaattacaggcatgaaccactgtgtccgacctggatacacttttttaaaaggctgttttgtaagagcagttttaggttcacagaaaaatcgagaagaaggtacaaaaatttcccatatatcccttgcccctacacatgcatagcctctccattatcaacattccccaccagagtggtacatgtgttacaattggtgaatctaattgacacaccatcacccaaagctcctagtttatattagggtttgcccatggtgtgatacaatcagtgagtttagataaatgtataataagctgtattcactatgtagtttcatacagagtatttgcactgccctaaaaatcttctgtgctccacttactcatctctccttcccccatccctagcaactactgatctttttattgtctccattgttttgctctttctaaagatgacatattgttggaatcatactgtctgtagcctttttcagattggcttcttttacttagcaatatgcatttaagtttcttccatgtcttcttgtggctcaataactcaatgcttgggagtactgaatattatttcattgagtctggatgtatcatggtttatttgtccattcactcctgaaagacatcttggtaacttccaaggttggcaattattaataaagctgctataaacatccatttgtaggtttttgtgtggacataaagtttttaactgctttgggtaaataccagggagtgcaattgcaggatcatctggtaagagtatgtttagttttgtaagaacctgccagactgttttttggaaaagtggcaatactgtttggcattcccaccagaaatgaacgagagttcatttggtgttgtcagtgttgtggattttgaccattctaataggtgtgtagtggtatctcattgttttaatgtgaactttcttgacaatttatgatgtggagcctctttgctggtacttaccagccatctgtatatcttttttgatgagctgactgttaaggtttttggcccatttttcttacagagttgttttcttattattgaatttgaaaaggtctttgaatattttggaaactagttcttcagttctttctctctctctctctttttttttttttttgagggacagggtcttactctggtcttaaactctgtcacctatgctggattgcagtggtgtgatcatagcacattgcaggtttgaactttttgactgaagctatactcccttctcagcctcctgagtagctgggactacaggtggtgtgtaccaccacacctggctaattaaaaaaaatttattttagagacagggtcttgctcagttgcccaaactggagtgcagtagtacaatcatatcaagcacatcacaagcgtatcactgtaaccttgaactcttgggctcaagtgatcctcccatcttggcctctcaaagcactggattttgggcatgacccagtatgcctggtctttagcttttctcatatacatcttatacgtatttcttttacatttatactacctaagtatttcacctttttcattgctaatgtaaatattattgtgtttttaatttcaaattctacttattattggtgtataggaaattgattgactttttgtatattaaccttatatcctgcatccttgctataatttcttagtagttctaggtagatacacttttaaatattgccttcttttaatcttaacattaaaacacaagcatttctgatgttatgaaaacactttctaggaagcattttttaaaatatcaaatattccatggaatggacacaccaaagattaatttaatttaaattccattaacaatggatatttacattgctttcaacttcttagataaatataaataggattacatagtatatctttgtgtatgaagtttttttgttttgttttatgaatttggaatttgtatgctgggatcaattttcaggaaactgaattgctgagttgaagtatacaaacatttctaatgtagtagaaacacatattgcctaactgcttcccctaagagttgtaccagtttatatttcctggatgagagtgcccatctcagttattctttccaactttggacttgctgacattttgatgacaaagggatgaagttgtaagtcaaatgtatagctctcaatgttcatatccagggtcctaccctaggtagaaagggaacgagactttctccttatagtaaaaatcaaaattgttcagcaggaggaagcaagcgggcaagtgatgctcccaagagaccacacggctgggctctgcctcaatggagggctttgctctggatgacagaaaggttgggatttaacttctgcttgtgtctagaatgactcttacagctctttttctcccaagtgaaggaagttaaaagatacttttaaatatgaagaattcaaacactcaagggagaaaattagtctgtcaaacatccattctgaactggaaggaatctgatttacttttgttgctgtctctgcaaacatttttctttgggattctgctttttcagaataaagaaggatgaaggacaggattttctagaaagcattttgcgtctcatgatttgtttataatatataatgtgtcacttgatgcatgcagtgtgcagttttccctggcatgcccaagtgctgtcctgccccctgctacttttatttcctcttgtagtctcttttcccttgtcttcttctgtatataactacagcaggaggaagaaccatcaaggtagtttttaaaagtagtatctacgaaagcattcctatatgcccttctggggcctttctgatctcaaataagtttggctggtattttcctggcaaaagaaaaatgaactataatatgacagaagtcatatcatggattttcaaaagctgtcctcaacaaagaaagtaaggggaattcggctcgtgggcacaattgcagggtatctagcgaagtctgacataacccagtcaggagacctaagaaggttaaaaaagtgctgtgaggcaggcaaggtgcttactgctcatttgataatttcttggaattgaatagtaaattgagcatttattatatacatacacattatacccatagatattcattcatatttaagtcttcaatatatatatttgagactctttcacagtatttgagtccttgggtgtcagaaatgtggctgtttcctttatgtgacacaagacacatttggtgcatctgaacaattaaacacttttgcctggagaaccttctgttgctctgtcaacaccatctagttagcattttctcatttacggagatgagtcccataattaggcccattattcttatggaaaaactgagatacagaccatccaaagaaaatgactgtgggaagtatgttctttctggatttctagttttatctaatattattagtctttcctagttttaagtctgtttacgtgtgtatgaatataactagctatttaaaaaatatgctgtgagggaaataaatacacatttgcttgtccgtttgaggttttgactgaaatgtggaaacttaattcagcttattaagtgaaatgtttttaaaatttgatattcaccaaatatttttacaaaaacaccccaagtgtagtttccaactatatatttcataacaaggaaaaaaaattgcccaccacttcctgtgcctcagagagtcaatgccttgtattctcctggcccagtgggcagttttgatcctgccagctcttcgaggacttacttgtacctttgcacagtttgtatactgtcttgtggatgtcttcctcatatccatgttgacagacaacttttgaagtaactcaagttgacagagctgactgagaacatttaatgtgtcttatttcacttgagcagcagcagaggccaacttgtttaaagagaacctgcaaaagctgctttccactgttttcctcagcttcatgagaagacctagtcacttttcagaatacaaaaagccagccagttccagacagtgcacacagtgcacatataaaattatttattgtccagacaaacatgtgtggctgggtaccagaaacacagaagaaccacaactgggactggggcattggcttggctccctcttgaagctggctgcagtaagcaagtgtgtgagagtcactttcagttcaaaaagtctgaatactcaagggcagacacattaggaggccatagaccaggaaccaggacaatcttcatggcaaagcagtagcaccatgttgaacttgtctcttcgtagactcctgcctgatagggtgaccgaagggcattatcccattcacagggacagagaatctaatgggattaaggaaatggagggtcagctttaaagaagcagaatagagtgagctacttaaaattatattggttgcacattaatcttccacgattcagaaggagagcattaccttaaatttcccagttactagagaatccctgaagtatacaccctctaggaaatctccctttatatnnnnnnnnnnnnnnnnnnnncagccataccagtcctccttagcttgcagtttcttgcaagtagcacatttccaagtatggaatttcaacaaagcacatcatatgttgagtgtgactgttaagtatttgaggctgtgatttagcatcaccatctatattttctcacagtgaggaaaatgaagtatgggggaatctatgacttgcatagaaatcaaggcagagtccaaaggagaattaacagcacagaggtctgtggctctagtgatggcttgggagggatctagttgttctaaccacatatacccacctcaaggtttcaggatcgggtgggctggccgcgtactgagttcctcctctggagaatcagcctggcagctaagtcagatcccctggggtctgttgataagttgctgttgttgttttttttttttttcctctagatttgactctaccctgactacgcctgatcaggagagtcaggctttacactacactttacccaagggagatgcagatactctaccagtgggtatgcaactgtcacttcatgcattccttggggtaaattgtttgtgtattttggaaagtaaaaagaatagtctggtgtttacagaagaatattaggggattgtcagggagcctaattttgtgttgttctttcgctctgtgaattctggcactacaacttgctatggttcagtgttttatgtcattcccccgtttatttcattccgatcattaatgaaaagcaacaaaagtgtagcaagagtgccaggccagttggtaggcataataagattgattagagcccaaaatgaaaacattaaactcacttgaaggcagccaaagccttaattctattacgtatgaacttcttttttggatacatgaatagtgaaaagtatttggagttgatagtgtgtgacttcaaaagcatgtgagaagttacttgcctttataatacctcatgacaactaagcaaaaagtgcatttatatttcatacaaaatactgtgtttattaagatcctctgaaagggcatgattgtataaatcaagaagcatctgtaatattttgcttaaaaattctttattctttggctgcaatagtctagcagctatccacttagcagatttaaaaaatgtattgttgcagaatcctcaacagttcttggtatttcagttatgactactattggacaaactgtttttgagaaaagacctgtagctaaaccatgagaaaaaccgaattaaaacaaaatggcgtgattgctgtaactttgaggttactatagtgtactggttttaaaagaagggaaaagggagaccagttaaaaggaaaaggaaaactaagtggtgagcttctgttgggaactctcacttcccactacgcccatttgttataaaaatatatgtacatatgatgacctaacgaagttctttcagagtattcctgctgttgcgtcctctccttttggtgacattatcccccatccactgtgaaaactaatgcattttatataacctaaatatgatgtagttcagaaatgccttaggacttatgggtaagattgataagttataagggaaaagaagaaccctggaagaaagcactggatcaggtgtcaagagaacagggctgcaacctcccttttcgtaccctctggctgtgttttcttggctctggcttcactttcctcatgtgtacagtgaaggggtggaggttggagtacataataatctcttgaagatacctgaaattcaggtagcaaaggagtgttaagatattagagtgttcttcatggcagaatcaggtagcaaaggagtggtaaagatcttaaggtgctcttcatgccagcatcgtttcagacttaaagaattctaaacaaaattattagcaaatagtcagccctgatggcattagccatagtgcaaagtcctgttgaatgagtagccatgacttgagtctccaaaaatagatctgtttctaggactctgtttactcacatcatttattaaactagtagcacttctgtaggtaaagcagggtctggtttgagtagactgacatttattttatgctctgatacactccaaagaagaatgaacccattaaagacattatctgataagattcctaagtggtagagtcttaccagtttcattagcaggttttggaacccctggtctaacgtgcctgtaccagatccagtgacttctagtgctacttatatataccttgtattaagattccttagaatgctcaaaagaccactgtgaaatacagaatttattggatgcacgagagttaacacataaatgtagttgaattttctttttaacttttattcaggttatatgtttatatagtttaaacagccacatagctctacaaggcccataacaaagaacagtagtttcatatttcacctttcccttcacccaatttctactttccagaagcaactcactaaactctttgaactggcattttcctctatattttgaaaacacatgtttatatggatatttcttgatttatttttcagttttaggtattttatagtaacttttannnnnnnnnnnnnnnnnnnnnnnnnnnnnnnnnnnnnnnnnnnnnnnnnnattatggaaggtgatgatttagctcccttactcaccctttcccccaacacaaatatattttaccaccacccatacttccaatataattatgagttatgagctcttcattgctatgtagcacattattctagatgatagtaccttaaaaacaacaatcatatcccacagtttccatgggtcaggaatctgggagcaacttagctggtgcctctggctcaggttgtctcagaaggtttcaatcaggctgtaggcaggtgctactgtcagctgaagaccccatccagtggagatgaaggagccacttctaagcttccttacatggtttttggcaggctttaattcctcacggggcaatttgacttgctatgccatgtgggcctctccataggaccgctcacaacatggcagcttgcttcccagcaagatcagagagagagggggagagagagagagagagagagacagagcacccaaaatggaattcatagtcttggaataacttaatgttagaaatgatagctcattacttctgttcgttataagtaagttcagcccacactcaggggagggcatcacacaagagtgtgaatgccaagaggcagtggtcattaggggccatcacaagtaattatgaggctgcccaccacaagtaattatggttaggccaatattcagtttttacattatgactacagcacagtcatgttctatgattaccttttctaatccaactcttttccacaagttaataacttatttttttgtttgcttagtgttctgtgcatccacactgattcaccatcaactgtcatgccagaattataaattgcttctgggtgtattgaaatacaccaagtataagttctatatgttttatcttttgggatagtttctcccagagttttctgaccttctccaatctggactgattgcttaggcattattcatagctataaaaatctgaaatatctcttgtataccattctgaagatgccattgcctcttatgttggatacactatttcctgactcatttctcttggtccatcccttcattttcgtggtgcacattttccaatagcttcctaaaaaaggattcatggtaggccggacacagtggctcacgcctgtaatcccagcactttgggaggccaaggcggaaggatcacctgaggtcaggagtttgagaccaggctggccaacatggcgaaaccctgtctctactaaaagtagaaaaattagccaggcatggtagcaggcgcttgtaagcccagctactggggaggctgcggtaggagaatcgcttgaacctgggaggcggaggttgcagtgagaggagattgcaccattgcactctagcctgggaaacaagagcgaaactccatctcaaaaaagaaaagaaaagaaaagcattcatgggaagtcaacattttgaaagctcagatgcttaaaaaatgtaacgcgtaaaaatgtcttctgtctaccctcatgcttgattgataatggggtcacatgaagacttggttgaaaatcatttttcttcagacttctggagattatgctcctttgctttgagctccccagtgttgtctccgaggagtccaatgtccttcctgatttcagatcttgtatttgatacctattgctccaccccagaaactttcatcttttctttgtttccagtattctgacatatgtcaatgccatcctttagcatgagtcctttttagagtcagggacttgttccttcacttaggctagagtgagtagcatggtcctagtacactacagccacaaattcccaggctcaagggatcgtcctgcctcaggctttcaaataggtgggacttaacagtcatgtgccaacatgctaggccaattttttttctttctattttttgtagagatgggatcttcctaggagtttaaaggtagtcttgaactcctggcctcaagtgatgctcccagctcagcctccggagttgctaggattctttttttcttttcttttctattttttgagatggagtctcgctctgtcacccaggctggagtgcagtggcacaatctcagctcactgaaaccttcgcctccttagttcaagtgattctcctgcctcagcctcttgagtagctgggattacaggctcccaccatcacgcccagctaacttttttttgtatttttattagagacggggtttcaccatgttgaccaggctggtctcaaactcctgacctcaagtgatgtgcccgccttggcctcccaaagtgttgggattacaggcgtgagccaccgcacctggcctgggattctttttttaatctgttgttctgagcttggtcctcttgttgaaaactcaagtcctgcagttttggaaattttatagatgtatttctttagaaaggattaatttccatttccatgctctctctttctggaactcattttatgtagaagttgaacctcctctaccaatcttcttttctgatctttctccttctttttcaaaactctggtttatatgcgttttgtattttctgcctggagagtttttcaaatttatctttgctttttcatttccctcatgtagtttttaatttctaagcgctttttattttctattttggttattggcattgctctcttaaaaagccttctattctagtttcatgaatgaagcatctcctcatttctctgaagatatttaattagcttttctaatttcttctttttattgtcagcattgcttttaattcgtctaagtttcttttttgtttatgtgtgtgatttgtcatgtgtattttttgttggagactttcctcaaatgcctatgactgttggctgtctgcttctatgagtggtgcgctgagaagctagtttgaaattctacatgcttcagtagaactggttgatggtataggcagacctggatcaattatttctgtagagttgcaattcccatattccttttctcttgcttttatcagttttccccgaaaaggcttcactgatcagctggcagccaactttcttggtgccaattttggaaaaaaagagagtgaaggattcactcttcattatataaactttataaactatgacttaaatcttccttttttttttttgtggccataatatccccattttacaaataagaaaatttttagagctttacatttctttgttgtaatttcttcatagctgttatttattccatgacctgaaatagagataatttcagtcaatatggaatgtgccatcataattatccttctacggagatctagtcatttaatttatcattattgtggtttgcttggcctatttttttttcaaatgtggcttcagcgatgcttggttttcagaagactataagcttgggacttaaaacagcagcatatgaatggccagagtccccctaacccagccctacctccctcccttataggtccttgccagatcattatgttgggcttgagctctgtttttatctttacttatcaacatgagctgttcgccaagctggtttttcacaaattctttcaatgttgaccagccctttaatatctgcacttctaagaatcaaagtcctaggaaaagacagatctcataagcactttccttctacaagggacagatgcatggaagacacctccttaaaaccaaggtacactgctatgttctgtggtaacaccaagccacggggcagggtgtattccccagagctccaaagcactctgctatcttaaccaaagcacattcagtcacctgtattttcaagtttttcttctcagcctagaaaggtgctttttcctttagtctacctacttcagaataataacaggtacttgcttgccttccttgagtggagactgtaaaaggtgattttaaatatcacattgatatcttactctgaggcagggatttttctctctcttgtccatgtatgtagccccggtgcccagcacattggctgttaccaataaatatgtgttgtctgaaggaaggaaggacagaaggaaggaaggaaggaaggaaggagggagggagggaggaaaagaaggaaggaagaaaggaaagaaggaaggagggagggaaggaaggaaggaagggaagggaaggaaggagaagtcaagtgaactcatgacttgacttcaacctgactgaaaacaatcttcccacttctgtccccgctccctcccatgttgctcaagtcctacacaggcacccagagggagcttgttgcatggagtccgtgctgttctgccagttgagtaaataggtgacaggcagtaaactgaaggaaacgtttttatatccttaaaagtgttatcttcgaggagcacagtttgtaatgctggagtgaaaagaagcctcctttcagatggccagcttgatgcaggcaaagctgctaatttgttttcaacttcaaggagatttagagccttggcttccctggcagtagctcacagtggaattgttttcttgctccttcatgtaagtctgctgcacggcaataagaaaggccggggtgtttactgaactggcaggaccaaattcttctttttgcagacagacctggagatttgttgcccaggacttttctgacttaatggtgtactcttgggaaaatacaccaatcttttttcatatctgagggcaaccacagaacagcccacaggaaggagcactagagtccagtcacttacctgttgggaaaggaagaatcagagggaaagcttttggctcatgggccctgggcagagctgtcatcagccctggcagaagtagacagcatacaaaggaaacacacatcaactaacacgcaccctcagaaaatgctagccagactcaaacctttggcaagtgacacccctggctttgcctgccagtctagatgtgagcatgggaacggaatggcagcccattgtggtgggaatggcagttccaagttgtccttttctggcctccggttaagtcccccgtctgtttagactacatttacaggaacctatcagtggcacttagaaggggaatgtagaaaaagaaactctgccaggtggttctatttgtgcattcttggtcagccatttcattattatgtggatttccatagttaattagattaattttagtctattacaatttgatgggatttttgtcccaaagtggaggcctttgggtactgagagttgaagttttaagatttcttggtaatgcctggatcaacattctaggaattgcttcattgccagctttccttttttggtggtggaaaaggcatgaataatgccttctttgaagctttaaggcacacaataagctaagaactctctaattgaactttacaagctgaaggggctgacttacgggcagcatttgaacaaacttctagtcaccataatttagtaagggttggctgccaaaagccatgtaaggctttatttgatccatttatgaattaagagcctgcagtaaattaattaccatatattggggctaataaaatctagcaggatgagaacgcctttgggttcatctgcagagaggaataaggactgagagctgcttcctggtgtctgagtgtttctggctcggggccttctgcagtgctgggcaagggtggtgttcgtgctctgtgtccaccaaagaggcatttgagctagcttttggctttgcaactgctggaaggctttgctctattgatcataataagctgttctgtcttattaaagttgcatcatggagtctggtttttaggagccctattgagaattagttgcagaagaagcgatttgcttgtattttccgacagttaacaggccaagcagatgggagagcagacctgaaatagttgggttggctgcctgccactgttctatgaattttgatttgcacggatatgtaatagttgtatttttcccttttttggaagtacttgcctgtgagccttgggaaaattaatccttggtttcctgtaaagtatacccttgtacgcgaatgttgctgcagtgttccttacagaccctgtgctgtgtcctatgtcaaacagatcaggacaccatagactgtgtgttcagttgaagaggagaagaggagagttctcgctccagtttcccatggctcctcagggaaaaactgttttcattcacaatttactttgtgttttaagatgttttccctttcaaagggggggattatttttcttttccttcaggctgtgttcaccaaaatattgaataaatgcaagaaaggatgttaaatttaagcttaagaaaaggaatttatagacaaatgtgaaacaaggatgaatgtatctgggtgaagatctgagttcttcctaaatcagttaaaatcttgtcttattaaacattaaatatatatgcaaaataatattttaaaacatatgcataagatataagaaacaacatgaaagcaaacgtatatttcctatcactagattaagtaatagaaaatttcactttcaggacttttttaacccctcagtgatccttccttaaccctattgtggttgttgccctccctacatagccgctatcctgaattttgtggtttttattcccatgttttatcatatacctctaaattcctaaataatgcattgcttagttttgcatggctttgcactttgcataaatggaatcacatatggtatatttttccaacttgcttttttcactcaacatgaagcatgagttcactgttaatgctgcatcatgttgtttgaatataccattattatttatccattcttgtgcccatggacttttgggttgtggccagttctttactatttcacacactttctcctggtatctaagccagttgttaaacaaaccaatctactttaaatagtgtgcggctatttttttttaaagatttgttttgctaacacggtacgtcacaaaatattttaggtattatagattataaaatgactttgttacacacttcaaagaaagttccatatttacacaatagtgtaaaggaacaggagctttgtttgtctgctcttaatagcggtctagataagtcattgcttctgcaaaatgcatttcattaatatttgttaaaactacagcttgaagagtcaaatggaattttaagatcagaaagataaacagaaggaaaagaaaacctccaagaagtgcctaccatttccatatgctgcattcacctctccttcttgggttcacagagcgtttattgtttgcactcgcccctcagatggctctaggcttctctggttacttctctccagtagcattcaccaaaggcctttgatgacatctctttgacttcatttaatgttgagaacacactaagttctcaataaatatgtaccatttttcaagtatgacttctgagacaggctttgttgaacaagtagaatgctacatctctacttctgcagcccatctccttgctgccagcaggcctttgtgtggccagctgtctcatgtcttttagctcttggcagagatactacctcccagaaaggcatttcttgactcccttttccaaaatagtctctctcctattacttcctaaacctttgccttattttcatcaagaatttagtacttaaaattatagctgcttgcttggttattatctctcttgccccatgtgggcatggagtctgtcttgtccgctactgtattccaagcacctagaagtgcctaacgccgtgagggggcagagcataaaaatggatggagaaagtgaatttcccttaaataacagatagattaagggtatttctaaaaaaatgatggccgtagtctcatggaatgaatcctgacagggacaagagtcatttaaacaagtcattaaactctttaggccttatttttctgtctataaaatgggattaaggatttagtaaacataaaatattaacggatacaatattgctataaaaaatggaaacattattatgagaatgtgttacagatacctaaactgccactggccatactagcctaaatgtttgtgaagggaatgtggattgaaagtgttttttgtaaattttcctgcaggaagaaagcagtcttcaaatagaaaaggatcagttaggttggaaggctccagaagactttatatttcaaatccatgatctccaagtcagcttgagtaatttttgtcaagaatttgcacacgtttgaatgatttgtcacttagctaacatgtactggaaacttactaataacatttttagttttcttcttagcacttaggtgttcagccttctgtaaatttcacccttgctgatactctttaatatcctcttgttttttcatcagggtgtatttttatctgactagctgagttgcagtctccttcaaaggagagactgttttgtttttaatttatttgtttttaattagttgttgtatttggcaaacatagtcatgtgctttgcagagaaagcgtgtttggataaaagcttattaagttgtttaaatacttttgattaaccttagaatcgattaggcccattcttctcaatctagactgcatattaaagtcattttagggctgggtgtggcggctcacccctgtaatcctagcatttggggaggtgaggcagaagatcacttaagtccaggagttcaagaccaaccttgtcaacaaagtaatatcctatctctacaataatagaataaaaaaattagccaggtgtggtggtgcatatatgtagtccaagctactcaggaggctgaggtaggaggattgcttgagcctaggagtttgaggctgccgtgagctatgattataccattgcactccacactgggtgatagagggagactctgtctcaaagcaaaacaaacacacaaaatcattttaggaacttagaaaaaaaatgcattggctcagtcctaatggtcaaatattctgaattaattgatttaatatgcagtctatgcatttttttaatgagttagtttgtaacttcctacaagttattctgatgagcagtgagaactgagaaccactaaactaggctggaacattagttcaccaatgtggctgcccactggaatcacctaggcaagttaaaacctactgatatttgggccccatttccacagaatttgatttaaatgggtatgagcatcaaagcttaaaagaccacccagttgattccaatgtgcagcggtttttgaaccactgcactcaattatgggctctttgaacatagtaccagacacagataggttagcccttgtctgactttacctgatgattcaatttacctataatgtgtagtgcttgctaaaatgcagattcctggataccacaccagaatctacaggagaatgtttagaggaatgccaagctccacgatgatttttatgataatgcaagtttggggaacatggcccagtaaatattccacttctagaattattatctttatgagtgaattttctcataatttacctggtttgcctctgagcagagaaacttgctttgcaagtacatactatcttttgaataattaaaaaaaaatttcatatttagtgaaaacgtatataagcagcaaaaggcatcaaattatgccatgtgaggaaacaattataattgctttctttctgtagttaaatgatcataaactacatgctgtatatatccttgaaataaacagccgatttagagataagcatttgataataggaatatgcatcaaaactgatgagaagtcttattatacctgaggtttcctctcccctactccattttctatttaggcttttttgaattttgagctgttgtctggtttgtgtttaactctattttgttttcatgatttttgttttaaggacatactcagatatagtattatattaaaaaagagaaatgaacaacaaaaaaaaagatgaaaagctgagctcattcaatagaatctatcgaattctattatgtgcctagcattgtgtaagaatgtttatacattttttttactaggaaataaattaaaagtttaagaccatctcttgtggttggaggataaatataaatgttttacagtgtccaaaaaatgtacaaactgcttaatccaccaactagttaaccaattgcataataattaagagtgggagagatatctacgtatctgtatttctatctataaccatcatattgtctggtgtttctaatcatttgtaagagatttccaatctcttgtaggagaaagttctcctggtgtgagttaagtacactgagtttaataataacaagcatttgcagctttgtgctgaatccatttgaaaggatgcacaaactatgctcatactgatggtggggatgcggggtgggtattgggacctgatagttaagttaggccccctcattggctattggaggctccagaaatgtattaattgcatgtacccagtctttcgggttatgttttttctgcagtttgagaatagccagtccactgcagttacccttttttcctgtttctttgagagtcaccttaacttagtaggaacttactgttgtcacctcatactcactacaagcctatgataaatgacttgggctcatacttttttccgatgaaataatttttaggagacatatttgttttctctggacttcctctgaacaaggttaagatctgagagttttgccttttagcatttgagaaggtaacatcaaaaggctgttccttcaaagaatgtcatgttgctatttaattggtaatcacttttcccctggtttagctctgggcttggtaaatttaataggctcagtatttttattttattggtactatgagatgagtgtctgaatcaaaacactaaattctgattaggaagacagttgaacaactatactgaagatctgttccagtgttacttgagaaacatcttaaactatgttacagtgaaaataagtgaaggtccttttgctttttgtaattattcattttgcatgcatttttcatttagtatcaggagacagttttcctgtttcccagtcaacttagccttactgaggtaattgagggcatagttagattagtttattagttctttagagattcattatttccatggaggaagagcataggccagtggttttcaactctggttaaacataagaattccttttttttaataagtggcctttgggatccagatcaaccaaatcacaatatttaggagtcagccatgctgtggttatttaaaaacaaaatgaaacaaaacctcccttataattaatgagcactaggatcggaaatcactgacacagacaaaccagttctgtattatatttggctgagagagagttaaatcaagtttatttaactaggtgcctattaatattttatgttgtattactcggtagaattcttagggaaagaatgactttttaaaaatgtttttcctggatactttcttaattcattatttgattctttttttctctgtagaattgggcttctctgaggcctgttaccttttctgtgtacttgatgataaagaagcccaagggggctggacacaatggctcatgcctgtaatcccagcagtttgggaagctgacgcaggtggatcacatgagcccaggagttcgataccagcctgggcaacatagggagacccccatctctacaaaaaatttaaaaaattagccaggtgtggtggctcatgcctgtagtcccaggtactcgggaggctgagctagaaggatggcttgagcccaggaggttgaggctgcagtgagttgtgatgtcatcctgccactgcactctggggtgagaccctgtctcaaaaaaaaaaaaaaaaaagagaagccccaggacagtatgatgtgcctgtttcttagccccaaagatgagcctagtttctttctccatataaaatatttttgtttaagggaaaagagacaaatttgactcttgaggtattgtgtgggtagacacatttagaagagaaggttgagaaattaaatctggtgttctcaccatgtgctgtagtagttattagaaacttaatgtggaatgggatttgtttttgtggtttcaaatgacctttcggatatggtgagttatttaaaaccccaggtggcaaggtgagtcttggcacattactgatctaggaattgggcaggagatacacaggcagaaaaagacctttctgggcttctctttatattgtgtgtctctatttctgactatttagttagagcttcctttgaatattttattatctacttggtttataatcaggaccacccacctgattttagcctgctgactcttttctgcctttttattccctcaagcccacagtgcatgtgtattcatgtttttgctttccattcacggagatctccagctgggaaaatatagtgtgtacaatactctctgccttcagctgacattgctcataaattgcaacagaaacactgctatcagcagcttaatagcaggtagaatacagctctacatatcaagtctcagcaggatacagaaactatggttaccaaatttccaaaggagaaggggagggggtagaaagttttctatctaagaataactgaaacaacattgaaaattgattcactgaaagcagctttttgaaaacgacttataagggctgacccagtggttgctctgctgtcactttttgctgaattgttatttctgaagacctcacaagaagggttttgtgtgatggaacggtatagaaaaggcaagcttgtttgcttctcttccttcctttctctgtctctgtctcttatagttttaaaagaaaagaaagggcctttgataaacttaatgaaaagtgtactggttaactgattctaaagtagggtgattaggtggagttaggagttaccctcaggcacactcaccgtcatacataggcatccctggcagaggatccacgcctatgacaaggaagaagcgagccttgctattagttttttctcttagctacaatttattttatcttgcgtggtgactcgtccagttatttgacttctggtaaaatagcacacatttacatagcatatcaagacgttcatattttaggctatgatgtgaaaatgggcagtcttatagagcctttccattaaaaaaaaaaaaaaagaaagaaaaaggatagctgcacttgtgaaaatttccagtgctttatttagcacatcattttatcttaataagtgagattatattaatattttgaaaagtcccaaattcccctctatctctgtgaagaaaggattgctgggctccgtcatcttttgtgagtagccacagcagaattctgcctcttgccagaagagattagtgtgggtggtaaaataattctttctttaaaccaagtaaagctgttgtattaatactcctgtcataggactcaggcagataaaaagctctcagccttgttccaggctccttagtgacttctaaaggaatagtcaaatatatcctattcccacctgcaacccagtccccaaaatactggaaagtaattaatcaaaattatcattccccatttctttcctgggaaaactcaacacagtttatgtatatcttagtttgtataatgtacatttttctttaaagtctgttagcctagtggctctgataagaatcaccttggatccttaggggagagctagggattagtatctgtaataaggactcaggtgtatttttatcatctggcgagttttgggaaaacacaggagtctgataagcctaggtatgaaacccatctataccatcctccaggagtgtgtgtgtgtgtgtgtgtgtgtgtgtttgtgtgtgtttgggagaagggattcatggattttttgaaccagggacccaggttctgaaacctacgctatagttcctccaaaaatggaagctgattcttaacatttggaataagctagtgccttgcagcctatagcgttcacttggcagggacagcccatttgttttgagtattgtattgtatgctgtccactgttcccgtcaggtccctgggtgctgaaccatctccatgagagcaggccgtgtggtggctgatgccatgctgagaacacctcttcttccattgtggaaagcacagacagtgtgcatccgaggatgcagccccccacctttcagccagagtggctatgtaagccttgtgataaaatgaagcaagtagagcaagaggcttgcaatgcaagtttagataaactctattttgtaatgtgatttcggtgggggatgctgagtcagtaggttcattcttgtctgccacgtgtccctgtcttatgaaggtgctatcccaggaagtctatggtcatatttaccagaggcagtaaagtcactactgctccatccgattttttttttcttctcagtgcactaaatatggtgctaaatgggttatattttagcagtatgccctttgcaataggtagtcttctggttccttctcttcaattactttatgtgccacaaatctgagacatttgggtttggctgtcttgctaatgaggaagtttaggattaaatgaattggttgaatgattgattaaatgaattgcttcctgtgtcaccaactgaaggactttggttattgcctagtgtattggccccttctttacccagacctcaaggaagtcttgtcttaaaccccctattctccaaagcaatttctaatcacttagctttgtgttagtcttactggggcaaaattcccgaaaggctcctgggcgtgggtcaggccttccagctgtgtgatgggcgttaaaggaacattatgctcactggagaagtgctgagagccaggcaactggtgtcctgatggccacctaccccagaggctgctgtgtgggggcaaaggatcactggaagagaagaaagttagagatccaagtgtggtttgggctctgtttttggctctgttccaattagttttagggcccaggactagccatttaacctctctgggccctagtttccttcttgataaggaggacaaatatggaataagtgatctccaagattcttttgtgcttgaaaattacgtgatttttttttttctgtgtggtgttttgttttgttttgagacagggtctcattatcatacctcactgcaacctcagtcacctcaaggctcaaatgatcctctggtctcagccttgtaagtagctggaactataggtgcaagccactacatcctgcggtatatatagatatatataaaatatatatatatataatatatatatatatatatttttaagcatagagaaggtctccatatgttgctcaggctggtctcaaacccctgagctcaagtgaatcctcctgcctcggcctcccaaagttctggtattacaggcatgagccaccatgcctggcctttgttgcttgtttgttggtgtttattttatatgagttctagatgtgatatggtgaagcttattgtgtgattcacgtaccttgtcatgtatatttagcacgtgaccaactagagcaaggggcaaagcccttgagttgagggccaggagtcttctgttcactctctttgcaccggtgtcttctacatgggaatactgggtaattgtcacaaactgggttccatttcctagttccacagattactgcctatgtgatgttgggcagttacttattgccttccttgtacctcggttgtacgatagagataccataatatagtacctcttgtttgggtggttaggaggattaaaagagttaatatttggaagacattttgaatagtgcctaacatagtcagcatgatatgcacttgttaaattaaacaaacaaaagggcaattcccagtgttataatatttgttctaggcagagacaggggtgtctgtcattagcatgccagcatgctgtctataatttggaatttcaacatcgaagaccctgctacttgtagatcttcttacagttatcaacaatggtgttgatgttgccacttgttttcttccagccacggtgggggtgggaggaagctgtgttcaggggatgaatgcagtgcaggacttgcacagaatgaacactctgtccccaggagcccagtttcactgattatcagaagcagctttcctctggggtcaggtggaattaaactataggaacacatgtagttgggatcagtgctttatgtataaatgctttgtaaaagatatttcttgccccccaccattcctcctgccatcctaacttccaaacccataccaataactttatttctttaatgtaatgactggggttgtgaatacagtctaagtagatgttatcttgaagagttgatcttaaatacttcatgcactcagggatcaggcagttcatttttactttgaattgaattgctaatttatattaagtagattaaaatttatgtctctgtaatctgctgctccagaggataccttctgcatctgtactggccatatttactcatatattgattccacgcacctacattgttggttactgtgaccatgtgtttttggaatgacaatttttattaaattttttcattattttgtgttctattttatagaatatatgcttgcatactgggatttctacatatttgccaagtttctattttgaaatatgtctttacataaaattaggctaatttaattaactagggttaagcattaaaggccataaattgttaaacagatgaaacacacacacacacacacacacacacacacacacacacacagagcaaacccagtttgtattttgatatttgagttgtgataaaagtagtcacattgagttaataatcttccagggctgggggagcggaatgtgcctttgctatattatgaaggcaagaaaattgaagtttttttctttccatttctttcccttgtattaggagccaggtacatgattgctagtagcctaaagacctgacattttaaaagaaactactctatttgtattatttggagagcatgaggtacccaaaagcacactgggaaagaaaattatcttttagtatttcagctagtacaagggaagtgcctattagaagcaatgggccgcttgaggacatggattgcatccagtagtggcgcattcaccaaaaggcagatgaaaataatctgtaccaacaaggatcacaacaggaaacatcatctgaattttccactattgacaatcttgactatctagcctgggatttgcattgccaagcaacacgttaaataattttgtatctctttgaaatcaatttctggtgatcacacatgcagattgaaaactatggctttaagatttacgttcagtgaataaaatttacgttccctgaaaggcaaagaaggctgtcatttcatgcctcctaaccttcattgtttatttccctttggtacacacaagcaacctagtacgcacaaacgtacatgcccattatggagagatagctttctgctctgtcaactttgttttataaaagctctgttttctttattgcctttatctattacatctgtaaaatttattttaagcaatgacaaatccctctttggggcccagagtctgggagaataaccactggcaggctattgggaggagatttgttggatatgactgttcattaaactgcaaggagtagtgggagaggccaacagtctggatctgccatggctgggcatgttatgggctgtgtttagagcttctacatcaggtgagagacaaatgtacctcatcaattgcttttgtaatagtccaataaaactggatggctactgaaatctcaggaagattcctgatttctttgacttgtgagattacttattccacaaaagtttctaataaaaaaatagaaatacataaaaccaaattgtttacagctatatcgtcagattattttaaaaaaggaaagaaccaactgagacaggctccttcacttacgagatatcagaagcagctgatgaacaattttcacctttccagtttttacttttatatttgactggggaacataattataatgcaggagctcttttggctctgttgtactttattttaatatttcatgtgattgaagcatggcagttcagcaaattaaatttataaccattggtgtgccagtaagtatttaacaactggctctgtggtgggagttgcagggagagagccctgatttgtaacatttgctgttttctttggtgattatatcaccaccgtggtcagtttcaagtttccagtgtgatgtcactgaacatggtatttttttttttttttggggggagatggagtctccctctgttgcccaggctggagtgcaatggcacaatctcatctcactgcaacctccgcctcccgggtttaagccattctccctacctcagcctcctgagtagctgggattacaggcacccaccaccaagcccagctaactttttgtatttttagtagagacggggtttcactatgttggccaggctggtctcaaactcctgagctcgtgatccatccacctcagcctcccaaagtgctgggattacaggtgtgagccactgcgcccagccttgaacatggtattgagaagagatgcttgccacctgcagcacatgcctccaacataccactatcatcatcaagatgaccttagccttgtgggtccccatccatacatgcaccattccttcatgacactgtgttatttataaataagtttatgtaaacttataaagtgcatttagaagtatggtatcagaagtcagactgcctgtgctccaaatctctgactttctgacctggggcaagtcagccagttaagctttccaagagttactttgctcatcagtaaaatagcaataataaaaggacctgacacacaggctctgaggaatgaatgagataagctgtataaaaacacttattcttgcgacctacacatagcatagcaaagcactcaatcaatgttcctaatatttattttctgtctttatcccctggggacaataacaaaaatgttaactgcctagtgtgtaaaataatgcttattttattagttttgaattgccttcttttaagcttcagaggaagccccaacttcaacttcaccaagattcagtgagcaaatcctgagttcagtttgtccataggcttacatttttagtgatttcaattttgacctcctgcagtttccatctttattaactcaagacttaaaatttgtagtgtgtcttttttcagcagctatttgtatattttgttttttttcctctgaattgtttcctaacttatttctaggctataagaaataggacgactcaagaaagttcattatataagaacaggctattattttgttttgaatgctttacaacatatgttttggtcctgttagcccatcgtagttatgagcttaatgtgctatgatgttgcattcttgtttgttaaaaattaaggatttgttaaaaatttaagctacagatacaggactacaatttaaagggaaaaggttaattgcaaannnnnnnnnnnnnnnnnnnnnnnnnnnnnnnnnnnnnnnnnnnnnnnnnnnnnnnnnnnnnnnnnnnnnnnnnnnnnnnnnnnnnnnnnnnnnnnnnnnnnnnnnnnnnnnnnnnnnnnnnnnnnnnnnnnnnnnnnnnnnnnnnnnnnnnnnnnnnnnnnnnnnnnnnnnnnnnnnnnnnnnnnaactgaatggcaccagaaaatgtaatcggccgcaccaggtagactttatcaagacagaaagcattgttctcctaaccagtacctttttggaaagcttatcaaatttagtattactttcacatatcttggagtcaatccattatctagcacacaaatggaacagaatttaaaatggctttctgctcaccggtttgggaaagtgtgcactaattcatatatactaattcatatgctgagatgtactaaataaagtattaatagcataatactttggctaaatgtcaaagtcttttgtggctgaaaatttctcaatcaaaagctgtgtataaaaccaaaccatttggtttttgtgctttttccctgaacccaagaaatttgatttccgaaatgtcaacatgtgctttctcacttgaagcattcacattctagcctgtcgtttaccactttgaacagcaaggttttgtggggtggggcaggttttgtgcatgctgtgtggtaggccaggtctgggtccccactgcagtgagcaacagacctggacgctctggtgtgtaccttctacggccacaccactcgcctttccctcctgtctcccctgagaggcctgtttgggtnnnnnnnnnnnnnnnnnnnnctgaatttcttcaaaggaagcctgaatggaatgctgtactcttcaccctgaggctatccagtctgttgctggctgctcacaaatagagctactagtttccactgaaaaagatctttagttattttaagcaaaggacatcagaaggaaataataggtttctacctcattcttccatcaggcattttcctgccctatatactaatccccacagatatctgccatgaaaaaatttatttattgttccaggtggcaacccccaagtgttagcattgtccagccaaacattctgtttgcattggtattagatttactggttcagggactgtggcgagtacaaatcagatttttgtccagaagtgtgtgtgtctgtgtgtgtgtgtgtgtgtctgtgtgtctgtaactcttgagagaattacaaggcaacctgggaggatgctgaaatatttggtcaggttttctttcagtgaagagaggtgtataaaacacacgctgatgatgagcagcaattaacagtgcattactttctggaaaaggcttgaagtcggctgccctgcaggtcagagtcaataaagactgagttactaacaatagcctttctcttgctaaagccttggacttaaccctaacttcatgagaccagagaataagagaataatgcgaacaataggagtcttggaggttgacttgggcctaatgcacagaggcagtaaaagctgtcagagagtgtgattgattggctcacacgccttagtccccagtgcgaagcactaatgttcctgcctcttctgagagggctgatgtgccacctggggtcagaacttatcagcctgtggggctaatgtttcagatgaggccaaagtgcagtcaataatttatacggaaatttgtgctcagattcgcaaggaaagcaggttttgacttgaattcctcagtcatccaagaaagaagtcagagccaacttcagatcttcctgctaacatcgctgctgtgtatattaatacttaagacaaacgtcaattgaagaagacaatttaagtcatcatgaagtatttatttagcagttaacatttggagccaaatttcaggagtttcagaattgatcagtgaaatggggaaaggaaacagcagcaattttgaattcatgaaaaaacaaaatcacctctagaatgtaataaccaggtcaggttaaatcagagtgacttcggaaactattaagtgtccatggggagggttggtttacaggccctgaaattgaggttcatgatactatgatactaacaacatggagagaaatgttaggtgatatcaaggactagaagagatacaaatatcggagaggaattagatttcagttagatgccttgaacacttcatcctgtttgcagagaacggttagctggctgtgtgtgactgtgtgtatacagacgatctcagtgtctgtgtaaacacacgtatttacacacagagtatatagaaatagacagtaaagcagtgacaccgagcaggctggtcaatcaataaccagctaagttttgttctgctccagcaaaatgacgactttgctccagtaagtgctaacaaaggcccttttaccttccctgtgctggaggagagcactattagtcacacttcattaggcttgtttacagaaaagagctggtctctaagcacgttattgaaatacttgtaactctgtggggcttttttttttttttcttccctgaaagataagaactttggaatgtggaatgggggagggtgggaaggcagcctctgagtgctgtcaagaaaactggtgggtccagatgggaattggaaagatgagttcatgtttaacctgctctgtccatctgcatccccagagccttgctgcagagtctcatttctgttgtcacggtactggggagctttaattttggcttttgtaatttagacaaatgtcaggcattcagttagctgttcctgaaaacatgaaatgaggttttcttaccctgaaatagtccagagatgaggcttcagtgatttagaactgcatttctcagttgcctttactattgagtagtcagaggaaatgtttgctttaaacaatggatgggttaggaaagataaattttatatcatttgaaattggtggtgggtatagaaataataaaagaagtccctcaggttggaatttgcagcccttaagattctaaaagaaagataggccacatttatagtaagcctggtcaccagcaatgtgggataattagtgtagatgcgcataactgagtttgcttcacctgggaggaatgcgggagggcttgctgccagctgcatttctgagtgtggaattcatagcattttggcatctccttccattcttcagcttatgacctgggtgagttacaggagagtttaaaagatgaggacgccgtagtacatatgctgagtggcttctttatgccagtgctcatgttaaatactttacataaatcacatcttatttaatatccatattactcccattttatagatgaggaaactgaggctcaggtaggtttaggttagctcaagatgaagcggctacaaagctggttgtgaacaggtgagtctgcctctgtctccagagacatgctttcaggtgcttagggtgctccatttgatggccactgtttattctttcttccttcctactcctcagaaatgactgcagagttcatcctttcagctttccctattgcattctgaacctgagccacatgctgtggcttctctaccagaatgtgggaactacttcccacactgcctgcagggcatggccacctccaggaagaacagggaggttcaccaacaacttaagcctcattcaccctgccgccaaaggtgaaactgagtctggtttctctgacattcatattccttgtttcctttctagatttgcaaagatggtggctttttggtgacacacaaaatgtacccctttgtgtgccatatacatgcagatctctcccattctctctctcacacacacacacacacacacagagttaagagaggcagttcttctgttttcggctgctgttgtaaattgctattttaaatttcagtgaatggaataatagcagagtgatcatttccagtaaatgttgttggcctttgtaaagaatagcttgttcagaggttttatgatttacagaggacacagctggtggccagcagagcggtaggaatgtatgctctcctgggcccggtatagctagagatgaaaagggcccagagctggcacaaaagcaaataagcgctctgactttaaataaagcatcataatttataggaagcctggctcttcaatcccagtgagacacatggatcagtagcagctttttgatgtggagcataattgtcaattggttcccactgtctccttacagctcaaggactggggatggtaagaaattactttaagatacagtcctataatctgtagttgtattacacatattttgacaagcaattcaatggcatttaaacctggaactctgctaatcacccatgacctactgatctacaagaggtggtgggtttgtgaggaaaactaggtgatgagaggagttaggaagacaatagctcctatttccttttccttgcctatccctccccacaaggcatgagatttttcattcttacattttatttcctttgcatctttcagtttcattcatcttggtaattactttgccttcctgcctgctcctccttcctttgctcctgccactggggaagaattgggcaagaaacagactatgctgccagatacagaaaatacggaagtggcagatagctgttaatgacttctcaaattcagagcattttacacccttctacgcccttttagtcctagagtactcgtcttttggtgagtggcatggagggggagtttttgcctgaaggatgatttatttttgtctggcttgctgttctctttacctgtttttttctagtcgaagtaatggcatcgtggagagcttgggtatctgagttgttaacttaaaaaaaaaaaaatcctgtaattaatattaagtgcaggaaaggactgggaccaatgatttgaatggctgcactctttcagttgcttatcttcagtgacctcctgagtctgacagtgggagtaagtgaaagctgtttccctctcattttgacagaccctggccctgtgctatgtgcccagggccacttgtaatagccgtcttctaaaataacactcttaggaaaggaatgaccattaggaggtaataccacaagatctgtgtcattattatggctcatagtaggcctagttcaataattacaaaatacctttcccaaactttttaacacttttatttaaaagaagaaaaatgtgtcctaacaagctaatgatacaagcttgtgagactggattggggaggggagtcaattctgttacagtgggcattgaacctttgtcttcccacaaagagagggaggaggaagagaaggagaaagcattctgctactctaatgaggaaatttggctttaaaaaaggagagggtttgagaaacctgccccacactagaaatcgtcatccaaactcatcagatttcagaccaaccagtggtgcctgacaaggagcaggagaaaaattaagtttcaaacttggcattagaaatcagagtgatgctgttgcttagtttggtggcactaagcctcaaaggaggcagctacttactaggaagtttaatcaaagacaagaaataaaaccccttggtacaaatgtatacagacacacactctatacatgtacatattcagtttatgcatttgaattgctccaaatgtctgtctcagaagactgtatttttttatttgattctatcttcctgtcctcctttgtcccttgcatcctgctgtgtgttgactgagcgctgagggaccacagcatgaaggccatcccttttggggtacagggggtggcttttgatgcatcccagttaaatgtctgacttgctgaccttgctgaagcaagctcaggggacttgtcttcttccctcctcccccaacactatcacctgaaacctgttctgcctgcctgtccccaaagtagggactccaggaaccttagcaggaactactagaggaacggtctacacaataaggggtacatattgtatatgaatggtgcagtacatatattttattttattttaaagctggcctcaagtcatcaagggcaatgttgctttaggatatgtatgtttgcctaacttaaaagcaaatatttttgttactgatcaaaattcctgattaaaaattactttctaaagatctccatgtgatttttttttatgatgctctttgttacttaaaatgtctaaattacacctaagacattttgtaactaggacacttgcttggtagaacatatgttttgattatttaaaagaagtaaagcatgtctttccacagtaaacattaattgatctctaatgatctgtttttgtttgtttgtttgtttgtttttttgagatggagtctcgctctgtcgcccaggctggagtgcagtggtgcgatctcaggtcactataagctctgcctcccgggttcacgccattcacctgcctccgcctcccgagtagctgggactacaggtgcccaccaccaggcccggctattttttatttttttatttttttattttttagtagagactgggtttcactgtgttgggcaggatggtctcgatctcctgacctcgtgagccacccgcctcggcctcccaaagtgcagggattaccaggcgtgagccactgcacctggtctctaatgatctgttttgatttagtatttcttttcatgttatatcttgggccctgtaagttttcactgatgcttaaacttggtcagtgaaaatatcgtcaccatctatatgtgcggtgcagcctcccacgtgaacatatgggacagcatcttagtgttaccggtggtgccttataaaagtcttatttctgctccctcttcttactcacaagactccttaacaggccattgtatcttctagaagtgggaaatgataatgttactagggaagcaagaaaaaagcagcttgggcttcttttagctgaccagtcagctggatattgaccacctgtcttcatgggaaagaaatagatggcagtgaataagcgagagtctagttttccaaagaagctcaatgattttcccaaatcaatacagctcatcaggcctcagaacaaaggctgcaggggaggtgacagtgatggaagtggctctgtgttcttttgtgtattaaaccataaggcccatggggaaacaaggtttctttagctgtgtgtgtgtgtgtgtgtgtgtgtgtgtgtgtgtgtgtgtgtgtgtgtttagggcttattctgtgtatttagggggaaaatcctttcagattttttttttaaaaaaggatttccatagattgtataccaatgaccaaatgtacttttgaaagagataagtacagtcaagtaagaaagattatcatgttttaaaatgcagagtagaacagcatttttccattgcttttgttattgcttaaggtttcattttttgttgtcgttgtatgtggattgggtttagatgaaccaaaaacaagtctgtgttcagattaacctctggcaaaccaagaatcgtaactaccctcccataaacaaaccctgttcctaatgccctgaaaataacaccaaaccctaataggaatgctcaactgtcatctgagaggttataattaacgcagatagagtgatgccaacatattccagccgctgacagagaagatctatccaaaccagcaatttttagcccttcagtcctttaatctttaagctcactgtgctttcataaagtagtacattaacaccagagcagtgtgtctctggggtttatgactggggtggcggcacactagggcataaagtgtttcattacacttccttttgttagtactgccctatctcccaagctccattgccatacactatttgttcagataaagccctatgttcagggtgactaatcgcagcactgtgttccagatggtttgattacaggatgtgtttaaagtgactcttcaaacattcagcccagcggtagggctctttaaaaaaaaaacatactgcattttatggtcatgtgacaacacttacttttcctgtcctagtgctctatatatacttggcacaggtaatgggaaagtccctctgatttttggctggcaggtattttatgagcaaccttagttgtacattttaaattttcccaaataattatatttgaagaaggatctgtctgaaggttataagctccgaggctggaacagcgaagcttgtgctatacaagattcagcctttacaaagtaccagtattgaataccacagagtgacgacaacataataatggggggagggagtcctgaacaaagaaatggtgataaatcataccttgcacaatagtcacgttgtgtaaaaatggagggtaatatgatatctgaaatatatgaattttatcctgtactcatgaaatcagcatattgtgacattttgtcaccaatgtttcactagaaaaaaatatataaaaggaaagaaatgtgtaaactttcttttttaaaggcatatggcatgaatgggttaccatttggtgttattcgaatgaggtttctgttttctgcctggatgcacatcaaatgcatccagatgtggtagtctgagagagttcaaaaaaacttctgtctgattccaaactcagcatttgcgatgcttggcaaagacttctgtcccggggatgaggcactttaaagactctgaagcagtctttaaactcaatacaaacagaattatgtcaatccactgggaaatcaggcatttgccccgttcttgaggaaacagcttcacaaataccagaaataataattcataaaccacatttataacatcttgggagcaaagcctctccacagagaatgtctatcatctataaaactagtgggagattatgcttattgaaaaagtatggtagtaataaaaggaagtcactgagtaggattcagtctagactctctctctcgtcagtcctcgtgtagttagttcctaggtgtttaatgaattctcactattaggtagccactgtgccgccaggggttgtgggtgcagacactgctcctattttcaaggagtgtcatctagttggaagagttaggcatactgtgtatacaagcagagtaaaatattatgggggccatgtattacggtaggacaaatagccttaagttcagacctgggaagttctccttgtcattcagggtcccagatgaaggagactctgccacctttatcctgaggacttcgagatcacaatagccatttccattgcagccagacagaaagggatgagaggttcttatgggccaggcctggaagtggcccacattcatcagttctctcacttgctttctgtaggactcagtcacatgtctgcatcggactgatagggaggctgagaaggagtctagttgtgagctcagaaaggggagggaaacatggctcgtacgtttccatcagggcaagaactgtgtatgcagtgctgtggggatccaggagagaatggctgtcttttggcagtgtgcctggtatgcgtgtgtctagggcaaggattcacagaagtgagaacctttgcatttgtctccatttgcttctaattcattaggaactttaactttccctagggatttggactaaggcatcttcaaggtttcttttaggggaattaaaaatgtgacatgaagaacggttgaagaaacttgtctaggctggagagtaaagaagacatagaggctgggtgtggtgggtcacactgtaatcccagcattttgggaggctgacgggggaggattgcttgaggccaggagttcaagaccaccctgggcaacatactgagagcccatctcattaaaaaaaaataggaaaaagacagtgagcaggaggtggggagaatgccaacatggtcattatccttgcctggatgaaaggctgttgagtggatgatgggtggactgcatctgcagggtatcaggaggctcagccaggaccaaggtattcaaagacaaatttagtttaacacaaggaacaactttttaacaagatggctggaaaataggcaatcctgggggagtgctggtgaaatcttctatcagtgatgaagctggagagaaaaaggacacacacacacgcacacaaagtcctgagggtgttgcaccaacagtgcagttggcttcctggtcttatagctattgcgcccttggaactttggcccatcatggttctttacgcctcttactatcttgcaagctttaggcttctactcctattgccagttctttggaacttccatatttctcattcagattcccaacataagtccctgttgggctggctgcctttgctccaggtgcccatcactggtccagtcagatgggggcagggttaggatcactggtctaggtgggggcaccatgaacatgaaatccagggtctagcctgacgtgatagcataaggggcctactgtaaaaatgcaggtaatagacaaaactatacttccacttgtgcatcacagtgtatgcctgtgtctcttctgttcttttcatgcacagactcttgaagtacagagtttggatggagctccaagtaaaacatggttgattccatagcactaaataggcacctaatgtgtaccctgtagacacacacaataagtgtttgttgggcttgacatcttcctggaaaccctttacaaaggacataacagaacactgactgaaatccttatgaggtctcaggcttttttggcttgaggaagtaacaggctcaggttatataataaagaccttgttcttattaaatgttctgtaggtaataggcctttgggggcagcatcttagacaaagtgttaacagtacaaagaagaaagctgtgtgtggtcagcacactctcaaaccatccattgtactcttcagctgtattcttactttattagtaataagcctcagatgaaatgttacagggcattagctctctgacaaaggccaggcccagtccatgggtggaaagggaagaataataaacctggtagaatacttgaatataaagatgaaaagtacctgtatagaacgtccccaacacctagctcactggctagatgtttgaataaatgtgcgtgaaaagaaactaatctttctggaataagtgtacacttatttccaattcacatgtgagaaatagaactttatgcccagatttataaaatacaaatttgcacttttaaagaactaattttcatcatgggcatttatgccttcagtaagtgtagtctgctttatgtgactgtgggttataaaatgttcaagattttgagatttcagcaaaatgataaatcatttacatgttttagaacctaaacaccgcctttatacttggcccttcacaatggggtgttgtctaaacatagaccttcttacaaagaaacagtacactgtgtagtttatatgagaaacattccttaagccttcattccaatatagagtggcagatttggctgtgtaaacatgtgcctgtatatattcggatgtgaattgtgggcagatttaaacactctgtggcattgtgaagcggctcgtacatataaagaaagatagacacaagcacacatatttaattagcactgcttgatggagactgttcaaaatctccttgggtgtaaagcatttgttttgagcattttaaatacggagtgcttctggaaaaataagggttacttatttaggccctttgaggttgaaaatggatttttctttccaggacttgattccttccgagtgcaaataacaacggcatcacttgtacttcgataagaggtctgcttgtgtggcttccagaaagagcagcaggagatgtgaataattttacagtgaggaagttgcaactgcagattagcctttgtgacagcttcaacctgtggccccagataaccagtgattaattgcctgccctgggtcccttccttttttcagactccaggtttcccttgagcctgtattgagacggtgaatttcgttctgagggttctgcgtgggccggcgtgttgtgtggagccgcgtggcgcggggagcgcagcacggtcacgcagaccgaagctttcactgcacggccggactcgttagtgcgaatgagcctgtgtcccgcgtgcaccgagggagccgagcagcgcaggcggccctctagccccgcacggccagcgcgccgtgggggatgcgtccctttgcctccgccacgctcacctctacccgaccgctgcctctgtgctccgggcggccgcctcggcccagccaatcagacgcgagtgctcgcagcgggcgccggccaatccgcggccagcgttctctggaaacgcgaaacccttaggggaaaagcaataacaaaagcctttcactgcagacaaatgttaagtgtctgtgcagacttttcctgtttttaattttattactgcaagaatggaaggtttgttgtttctttcatgtttcctttcaagcaattttaattatatatttgtgctacatcaggggactctggaacgcagtgattcagcctattggatctaaagctaaaatgcagtaaccttctggcagtacagatatattcctgcactgtaaatatagctgacatgctaaagaattttaagcagctgcaaaggtctttgacaccacacacagtgccccagagagaagatgatgagaaaaccagctcagtcttcccctttgcctcctctcccaccccctcccctttcctgaagggatgtgttcataaagaatcctttcctccaattgttctgtcttgtgcagattttgaccaaatgcctaattaccatggattctcatcgcaataggaaattttatacacaatggttttaaaaaaatttcctgagggaatttcattggaatcagctatgatttgaggaaatacttgctttgctccatcctagcctttcccctgctagcctattgctacagtacactgaattaacacagagtaaataattcagctgttgcctaagtaatagcaacatagaccatatgggaaacaattttaaaatctccttttgagactttggaaagaaatcgttctccattacttgagtcccaaccattgaaatattttacctgctgttaaaaggttcccaaggaaatgagtcttaccttgtcaggtttcccttactgtaaaggagcccactacaggttttctgtaaaattcacaatggcaatggtaatgcaagtgagcaaactagctagaaacagattttgactaatgtcttctggtgcttccaagaaagagtaggggtagatgcagaaaagaaaacaaaggctcagttaaatattttatttctttaccctaataatttatgtatgtctcaaaatcaaggttctattaaaatatgctttaaagaagtgatttttgtaatttggcatttgtcctctcagaaataaagaggatattatattttctctgtgacatttggtatactaagcacacttaagtttagtaattcacagatgcagtgctaaattaaattgtctgtctgaaaagcagttggaaaaagcagaatggcttgcaggaaacgagtgtgttagttttgagatttcttttctaatcctctgaggcaaatgcgtaccaaagttgactccaaagataaccccaagagtaaatctattgtgcacatttgttttcttaagagggctattttaggagtccttaatatgaaacaaaaccaaacactgaaacagatacggtacccaggctgattactgtctcacaaagtcaaagaggggaggattagggaagtgaaatcgtagttgattgtctgctatctggactcttgagtccccactctcctgtctatgcctatttttatgcacctgcataattattttttcttaataaaaatcaccatcattttatattgttgaattggaaacaaaaccgattcctttcagtcaccctctggtttaagcactggtaactggcgctagtttatattggctgcttgccaaacgaaagcaattatgtgtaataatagaaaaattaagaggtgagtgttgctgttttacagcaggacatggcaaaaaccatttccttctgtcagcagtatcttgattacactctcacacacagtctcactcctttgtaccacatgcgcacgcgcacgaatgcacaacacacattatttcctgtgggttttaacttgaggtcactgaaaccagaaagaggaagaatgcaaaccacagcttttaaaagcaaatgagaatagaactttgctggcaaaaaaaagagaaaaaaataataagtgaactggaaataacagtaatcagtggtaactatgatcctttttcatcccctgcctcctgcaggtgtcctagtggtcaatgtcacgtggaggaacaaaacgtacgtgggaaccctactggactgcaccaagcacgactgggcccctcccaggtatgaacagggccttttatttctctccttccccatcctctctttgcagggaaactgtagagagagattcataatacataaaagtgtgcctgtaattgaaaccaggcaaaggagaaatgagcaatttaggattgaacgcagtaaaatgcagatgctaaatttcttttctatcagaagatctctgctccccaccccttctctcctgtctttgttttcattttttctcaaagtgggaatttgaactggtttggaagctagctacttgagctgtttttctttggtttttctgaggaagaatataagcccttggtcgcctgttcttttgcaggtgttggaaattgtcagtcttttccttgactgggcccagccctgaagctactggagtgttgactcctctttactgcattgtgtactttgtgatttcacctggctcttttggggatgctcattttcacatctgttacttgcttccataggttttgtgagtcaccgacaagtgacctggagatgagagggggccggggcagagggaagagagcgaggtctgctgctgctgccccgggctccgaggccagcttcacagagtccagagggctgcagaataagaacagagggggggccaatgggaaagggaggcggggcagcctcaatgccagcggacgaaggacacccccaaattgtgctgctgaggatatcaaagccagcccttcctccaccaacaaaaggaaaaacaagcctccaatggagctggacctgaactccagctctgaggacaataagcctggaaagcgtgtccgcacaaattccagaagcactcccactacccctcaagggaaaccagagactacttttttggaccaaggctgctcttctccagtgttaatcgactgtccccacccaaactgcaacaaaaagtacaagcacattaacggcctgaggtaccaccaggctcatgcacacttagacccagaaaacaagctggagttcgagcctgacagtgaggacaagatctcggactgtgaggaaggattgagtaatgtggcacttgaatgcagtgagccaagcacaagtgtatctgcttatgaccagttgaaggcaccggcatcccctggtgctggaaacccacctgggaccccaaagggaaagagagagctgatgagcaatggcccaggttccattattggtgctaaagctgggaagaattctggcaaaaagaagggccttaacaatgaactgaacaaccttccagtaatctccaacatgacggctgcgttagacagttgctcggcagcagacggcagtttggctgctgagatgcctaaactggaagcagaaggattaattgacaagaaaaatttaggagataaagaaaagggcaaaaaagctaccaactgcaaaacggacaaaaacctctctaaactgaaaagtgcccggcccattgcccctgccccagcccccactcccccgcagctaatcgctatacccactgcaacctttacaacgaccaccactgggacaatacccggactgccctccctcacaacaactgttgttcaggctacaccaaagagtcctccgttaaaacccattcaaccaaagcccacaattatgggagagcccatcaccgtgaacccagctctggtgtcactcaaagacaaaaagaaaaaggagaagcgaaagctaaaggacaaagaagggaaagagacgggaagcccaaaaatggatgccaagctggggaaactagaggactccaagggggccagcaaagatttacctgggcattttttaaaggatcatctcaacaagaatgaagggctggcaaatggactgtcggagtctcaggagagccgcatggccagtatcaaagctgaggccgataaggtttacactttcacagacaacgctcccagcccttccatagggagcgcctcgaggctggaatgcagcactttggtgaacgggcaggcaccaatggcacctctgcatgtgttgacccagaatggggcagagagttcagctgcaaagacaagcagcccggcctattcagacatatctgatgctgctgacgatggtggttctgacagcaggtcggagggtatgagatcaaaggccagttccccatcagatattatttctagtaaggacagtgttgtaaaagggcattcttcaactacagcacaatcatctcaactgaaagagtcccattctccctattaccacagctatgatccttattattctccaagttacatgcaccctgggcaggtcggtgcccctgcagctggaaatagtgggagcacgcagggaatgaagatcaagaaggagtctgaggaagatgctgaaaagaaagacaaggcagagcagttagattctaagaaagtggaccacaattctgcatccttacagcctcagcaccagtcggtgatcacacaaagacatcctgccctggctcagtcactttattatggccagtatgcatatgggctctatatggaccagaagtctctgatggccaccagccctgcctatagacagcagtatgagaagtactatgaggaccagaggctggcagagcagaaaatggcccagactgggagaggagactgtgaaaggaaaagtgagctccccttgaaagagctgggcaaggaggaaactaaacagaaaaatatgccatcggccacaatctcaaaagctccctctactccggagcctaacaaaaaccattctaaactagggccatcagtgcctaataaaactgaggagacaggtaaatcgcagcttctctccaatcaccagcagcagcttcaggccgacagcttcaaagctaagcagatggaaaaccaccagcttattaaggaggctgtagaaatgaagtctgtcatggactctatgaagcagacaggtgtagacccaacctcgagatttaaacaagtaagattgtggagcgtggccccaacagggagagagcagtctgagacttgtattatacatgtctgggcttgatctggttagacttctgacacaggaaagaaacccatattagttttttcctctgctcttgaaaaatatcttaagattctcaggagttactatgtagctctaaaatgtacattatcagtattttcttgtcatggtgtatagtaaaaggaactgtggatgggtgctttgcagatttgtgtttcatgccactaacttgctctgtgactctgatgaggtccattaatttctttttttaaattttttaaattttttgagacggaatctctctctgtcacccaggctggagtgcagtggtgcaatcttggctctctgcaacctccgcctccgttcaagcgattctcctgcgtcagcctcctgagtagctgggactacaggcacgtgccaccatgcccggctaattttttgtatttttagtagagatggggtttcaccgtgttagcgaaatggtctcgatctcctgacctcatgatccgcccaccctggcctcccaaagtgctgggattacaggcgtgagccaccgcgcctggccaggatcccttaatttcttagtccaaggcgagggctttccacaatggggctgctgaattctgttctaactctgagattctgagtcttatctctgaaatatttattttccattttcaaatttctactagcatcttctttgaagataataaaaactgggtccctgaattcacatttcccattaatctttttaatagaatttggggcccaaatttctttcacatggggtcagagatgcctagatttcagtcttactccctatattaagtaccccaaaactcagagctcagtgctgaatgtttgtgaggagggtgaggaggtttgggtggcaggcctcaacagctgtcccagagccccatgggtcagtcagcttgagaacacctgaaaattggtcaccacgaaaccacaaatgtactagcaccttctgtcatggttcagacatcctgacccactgcaaccccgtgagcattaatcctggttatttcccagcactgcacatccccactcccaccctcacccccatgcttagataatccctggtgcattagagcaagaaccaccagcccccaccaccgccacccacacacacacatttacttaggcacaactttgcatgttctctgagaacctgaatccccagtgggtttatatcatgaatgggatggggatcacaaaggccatttaggattctcagtttccccacttacagaggcataaatcaggctgtcaattcacagggctgcagaagatttatataattttgggggtttatagatagatggctttgttttccaatagagaagccataacgtgtgctattaatttgaaattttgttttgattaagatgttaacacgtaatgagaagtgagccaatatattaagcctcagctgcagtagatgaggaaaatgtattaggaaaccaagagtttttcctcctaagtgatgttaatagctatagcaattacttaaatttactattattagcttgagttggagtttttaacattcttttcacctgtgtgagatattaaaaggcaaacgaagacagaattaaatatgtctgaggatgttatttagtgttgagaaatgacattaagggcccagctctgaatttcagcagacctgagtttgaagcccagctccacgactgggcagcagcatgaccttgatgttgcctgaactttaaacactttggttttatcttctgtacaggggatcagtaataatgcctacctgggacattattactttgtaagagaaggaggtaaagcaattagcacagtgtctagcacagaaataaatgtcaacttagcattaaaattaagagtgctagtgctgtcatgattattaacaagttttctttaaaattgaaattttaaaacaaatctgttgggttttttttctttaaaacaaaaaaatcaggacccagattcaagaacatggcatcattatgtataccagcccaaatatctggatcagcaaaagtcagaagaacttgatagagagaagaaattaaaagaggatagtccgaggaaaactcctaataaagagagtggtgtgcccagccttcctgtatcgttaacaagcattaaagaggagcccaaagaggccaagcatcctgattctcaatcaatggaggagagcaagctgaaaaatgatgatcgaaagactcctgtgaactggaaggactctcggggaacaagagtggctgtctcctcacccatgagtcagcatcagtcatacatacagtacttgcatgcttatccttacccacagatgtacgaccccagccatcctgcataccgggctgtttctcccgtcctaatgcacagttatcctggtacgtgttgtcggttctgactatattggaggaaagaggcgatgttcaaatattagctgttaaaaactcaagataaattagaagcttcaagagtgacatttgttttccttgtttttatgctgtttaaagtcccaaagataaaactgatttaatataagtttttttaatgaaatgtcaagaatcctcagccatagtttccatagtctctgatggtctgctatagctgttaggctgacagatactttattgcctataaaaatattctaagcacttactgtcataatcattatagttactattcctttcacttaagcggacacgtaaatgtatgaaatggctataagctcaattctgtttataacctcccttcatcaggatgaattaactgggagaagaaaattggagaagctagacacagtttaatgatgatgtagcccattcttaatgtaaccccctattttaagatctctttgactcttatcccaaattcatgtaaccccaaatgattttttnnnnnnnnnnnnnnnnnnnnnnnnnnnnnnnnnnnnnnnnnnnnnnnnnnnnnnnnnnnnnnnnnnnnnnnnnnnnnnnnnnnnnnnnnnnnnnnnnnnnnnnnnnnnnnnnnnnnnnnnnnnnnnnnnnnnnnnnnnnnnnnnnnnnnnnnnnnnnnnnnnnnnnnnnnnnnnnnnnnnnnnnnnnnnnnnnnnnnnnnnnnnnnnnnnnnnnnnnnnnnnnnnnnnnnnnnnnnnnnnnnnnnnnnnnnnnnnnnnnnnnnnnnnnnnnnnnnnnnnnnnnnnnnnnnnnnnnnnnnnnnnnnnnnnnnnnnnnnnnnnnnnnnnnnnnnnnnnnnnnnnnnnnnnnnnnnnnnnnnnnnnnnnnnnnnnnnnnnnnnnnnnnnnnnnnnnnnnnnnnnnnnnnnnnnnnnnnnnnnnnnnnnnnnnnnnnnnnnnnnnnnnnnnnnnnnnnnnnnnnnnnnnnnnnnnnnnnnnnnnnnnnnnnnnnnnnnnnnnnnnnnnnnnnnnnnnnnnnnnnnnnnnnnnnnnnnnnnnnnnnnnnnnnnnnnnnnnnnnnnnnnnnnnnnnnnnnnnnnnnnnnnnnnnnnnnnnnnnnnnnnnnnnnnnnnnnnnnactaaaaatacaaaaagtagcctagtggtagtgggcacctgtaatccaagttactcagaaggctgaggcaggagatttgcttgagcccgagaggcagaggttgcagtgagcagagattgtgccactgcactctagcgtgggcgacagagcaaggctctgtctcaaaaaaaaaaaaaaaaaaaaaaaagacaatagaaaatctggttcaaaatgacatggcagtaactgatgggaactagtagccccatctaggcagatgtgctgctccccatcaatgtgcatggatataaatagaagctccctaatctgcatcacttatctttgttgttaacttgacttctggagagatttgaggtttctgctacttgtattgacccttcatattcacatcatcagtgttcatggttgggggttcatcatgagcaaagctgagtgcccgtgacatgtaataaggcacaaatttgagccttgtacagtgtgaggctcatttgcaagagtaagtcatgtggcttaggagtgagagctgtgtctgctgttttctggcnnnnnnnnnnnnnnnnnnnntgagagctgtgtctgctgttttctggccttgactctttgtcatgtccctttaactctgctgaagtaatacaatgtctgtgaaagatggctcttccccaaaaaaggtgactgctctagtcctagagactgttgtgaagagagactaaacaaaaataggatggtgcttggctaggaaagagtttaaagtaaattaaaataatagtatctgcaatgtgtgtgagtctaccagaaactctatagagaaaccagaaaaggggatttctgaatctttttctgagtcctccttcttagtacaaggatttcttttaagtgagaagtataactttagttaaagggtggttaggctgtaaaggtagaaagtcataggaaatgaaccatccttaccccaaactatggtttgggaggatggggccttctctttgagagttcaaaaattgagagattcaaaatgtgggtgtaggacagtgatttcttgtgctttatattggcatataactttagagcatgttttttcagtagaacaaaatgtatacagacacgtttaaaactgtgagatatgttctctccacaaaatacaagtgtaattagaaaacttgaccttaaagatatctccaaaactacttattttgtaaaagttgtttatgggaagcaattgggtaaattcttaacctgcaattatgaatgaatatagagagaaatcctcttatttccgtcatttcaggaaaacattggtgtcacttggtttactttgggtggagtagttcttttgtgttggcttaattccaactgaaactaatgcatgttttttgaaattctctttagttactaaagaattgtatctttatatttactttttaatcattaacacaatattgtcgaagggacaaaggtggtttagtactcttaaaagttgattttcagagcatgaagggggaaaatttctcttttctgttgcagcctgtggaaaaggctacagctgagcgggaacgggaggcagaaagggaaagggatcgccactcccccttcggccagcggcacctgcacacgcaccaccacacccacgttggcatgggttacccgctaatcccgggtcaatatgacccttttcaaggtcagcagctctatcattactgtgtctttgtccattctgctttggaaaacagttgctaaaattgcatttcacatcttaaaaatattgagctttgagttcacattagctctcaggagggtttttaacacttattttctagtgacacagctaaggctattcccacatctttgtattctattgagacatgaaatggctaccacttaataattgtcaccagttgatgttatcggcagcttactgttatctcacagactgagggcggtggccagtgtctggggcactgaatataacaatcagaagatcagatatctacttcaggaaaattgtagaaaaagggagggatggtgggaagctttggtgaaattacttgttctgatttctgcatgccttttaagttgctcttttcccatggaaatcatgggagtaatgtgatcaggtttaacacttttataacctcattcgagggttcttcacagcccttcactgctgcgacttcactaaatgggagaattgagaaagagaaacatgttttaagccataggattgatatgagggaatcttcaccttgtagttcattagttgagcatgtattatttgtcccatctttgtcatctcatagtaggtgggtggtggcaccatctttacaacttgctagaataccacagattgcatggctttaaacaacaggaatttattttctcacagttctggaggctggaagttcaagatcagggtgccagtacagccagcgtctgctcaggcctctcttcctggcttgtgtgcagctgctgtcttgctgtgcgctcatatgacctcttctttgtgcatgagctggtgggtggggaaggggcaggggggagccctcgtgtgctttcttataaggacactaatcatgccctattagggtcccacccatatgacctgatttaaccttaattacctccttataagccccatctccaaatctaatcacattgtggattagagcttcaacatattttgaggagacataatttagtctattgcacttgccaagttgcctcttatgctactgtgtgaatagaaagtaagataatatgtttgaaggtgtttccaaaactgggaagtgatatacaaatgtgaaggggtcatttttatttattcaggtctttttagttgatgtcatctagtagtgttaaaagagagctttcctatttcttaaacaatttgtattgagtgtaataagaacttggaagagaaagaggttttatttctagtctaacacattatatctatatataaataaagtatatatgagaagaaaacaattgtctcttttaagataatattattgttattgtactgtcttaagttacctctgggaaaagaaaatatatccaaataaaagacctagaaggagacagtaatcttccctaggtttgcatttgtttactctatttttccccaggactgtcttctatagaatttaaaagaattctctgttaggcaacatcatgccatttggagctattacagtctctgactgctacctttgtcttgcagggtgaaagttaagagcatttctaagtttgatttactgattctgtgtatcttatgggatgcattgtgttcagtcactggggaaaatgttaaagtgataacaattattatgaaagtattgtattctaggcaaatagcatgccgcttctgtaattcactgtgacttttgattcctgttgttacctggtatctgttatttctcctgagcttcctattcagggaatgcatgcaaaccatttagcaccatgcagagccggagagatggaatgctgtatctccttcgaatagctattaagaaaactgcagagtattcaagaaaggatagatagcagatagaccaaatggtttgtactgtgtccttgctgcatgaaacagttcatgtgtgtgtttaggagaggacaccatgctgctactaggtctgcggcccttctccactgggcctgtatctactcttatccttctaaagatcacagacactctacattttttccccattaggcttgacctctgctgcccttgttgcctctcagcaggtggctgcccaggcatctgcatctggaatgtttcctggacaaagaaggtaaatatcctctacatttttaattagttgtagatagaaatatcttaatggttgggaggaagcaagtacaggatttttagaccaaaaacttaactccttgggttttatatcattgtaatgaatgtgtttattatgccaatataagttgcttcacatgcaacttaaattccatgaacctcattctgtaagggttacatagattagtaattaactgattggttttttagacagttgaaattttcttgggttatccttacggcatttctaaaataattcaccatgactccctttgttttattatgtttaaagataaagtcgcaaatggagacatttattttcataatgctaaaggtaatgtttgttctttgatattttaaattattccctaagttttatgaaggaaaatgatttaaaggaattaaattattaatattataaaattaatatttttcacaatgtatatcattactttatgtttattcactttctctggaattgaagtccacatttgaatggaattaaaataagactatcggtcttatggttttctggtttacagtgccaaatgttgatagaggctgggcatgatggcccatgcctgtagtcccaccactttgggaggctcatgcaggtggatcacctgaggtcgggagttccagactagcctggccaacatggtgaaaccccatctctaataaaaatacaaaaattagctgggcgtggtggtgtgcgtctgtaattccagctactagggaggctgaggcatgagaattgctggaacccaggaggtggaggttgcagtaagctgagattgcaccattgcattccagcctaggtgatggagtgagactctgtctcaaaactaaaaaaaaaaaaactgttggccgggtgcggtggctcatgcctgtaatcccagcactttgggaggccgaggtgggcagatcacctgaggtcaggagcttgagaccagtctgaccaacatggagaaaccccctctctactaaaaacataaaattagccaggcatggtggcacatgcctataatcccagctactcgggaggctgaggcaggagaatcacttgaacccaggaggcagaggttgcggtgagccgagattgagccgtggcactctagcctgggcaacaagagcaaaactccgactcaaaaaacaaacaaacaaaatgttgatagaaccgtgtgctaaggtttgcttttcttttgcagagaataacaagattggacatgtacattgtcatgtgactggatcacatggggaagcgctttatacagacatcagttccatggtgttaatttgaaatgccttaatggcaggcaaaaaccagtcatttcatttttgtaaattacagattttatcacagagtaacaaatgttgctgtaattaaacttctgttttatatatatatacgtatacatatctgtatatatacatatatatatatataaatataaatatattctttactttttgtatcagtaaccaggctcgcacacacagggtctgctgccacgtcgcaaaccactcagtaaaggaaattaaaaatgtatttgtcatgttaaaaagtgttagccacaaaaggctacttactttcttttccttttcctttaaaattgtaaataaataatgttatgtatcagtgtgcctgaaccttgcatatccttcacatatttcccataagcccctcagaaaggctaactgtgatgatgacactttggtacaatttagatgtctatttggtggctcctgttaaagacgcaccagtgtaaaatgttcctgtagtcactgtttgtacttgtgtattgtggaaaaagtacttttggaaggcatggggttgccagtaccacaaaaactgtgttgtatataatgtaaagattaaaatggggaaataatgagcatctgtgaataatgaggtgtcattttttgataatcttgaatggcaaataacccaatagcctgcgtaccagagacatctgtgattgttctattacttgaatagttctacagtctttttttttttttttaatgtttacaattatccagttttagaagagagagactttaacgccattgcctggttacttgttttatgctgtaatctagtttattttatgtaaaatgtatattgaatgctttccttttttatacctgccttaaataatttggcaatcagaattaaaaagtttttttttttttaaataatggcttcttgtctgtctcatgttattttctacctggctgatagtcattctaattttcaaagaagggtttcttaatattattaatatccaatgcataagatacagtaaacagatattaacttttcttataggatacataggtataacaaccaaatagtgtgtttaattcggtgaatgtattcccatttacagggtatttaccctaaacatggagcacgatatcactagaaattagtagatacaggtttctatggtatggaatgatacttcaaagatgcaaatgttatgacatgtggataacaggaaaaatatgtaaaaagtcatttagtcagttagctgtcattacattgatttactagaatattttatgccaaattttaactgcctcttctctcccttctttgcttggaacaaacacttactgagtgcctgctttatcccaagcactgcactgggttctggcatattgcagtaaacaaagcagacacaaattcctgtcttcatggagctttcattttttggtgggtgggataaacatatcataaaatatctgaataatatatagagcatgttagatggttgataaatgcaatgaagagaaatgaagcatgggagtggggcatagtgaatgtgtgctggagtttgtaactgtaaacagagtggccactaaagagatgggggggatccatgcagacatctgggggaacaccactgcagtgacatggaagagcaagtaccgaagccccaaggtgggagtgtgctttgtatgtttggactggttgatttcagtgctccattccagctgtaagtttttattattttactataattgctaatgacagtgctaccacgtggtttactaaaaagttctttaagctgacggaatttgtcttggtataatttggttagttctacctagaggcctttgcatcagaaatgaatagaattttgcaatcaaaaagaaatgtttcccttgattttgaaagaccaccttagagtattgcctttgctgcttggcttacacatctagtctatgttcttaatagatttcagtaagaagatatttttctgttagttttcagtttttcttttgaatttcatccaagctgtcatttataaaaatatcgtttgtggtgtttaatcctgtacataagagtatttcacatatttttcatcatttttaagctatcaacgctttttcgtttttatacgacatcttgattatccttgaagacttgaggtaatttgtcttataccagttaagcaagtatgttttctctgttcagactatagttggcagggtatctgttggttgcctacatgctgatccagttcttaaccaaccccttaactgtcaaagcacagaagcagaactaaggtcaacttacatcttcactagctgaattttcatgttcttgttggtagctgggtgatactgtggattcctgatgattttcttgctcttaataatatatatggaagccaatcttacctttcagctgcaaaatgactagatgtatgtttattacatagcaggctttttaaaatcacttctaattaggtggttaagtaaacaggttataaatagctgcattggaccatgtttaactctgctcctgtaataaacaggaatgctgataaatacaaagagatatatgaccaaaagcacattgcaatttgaataggctcttcccctaggcttttactggaacattattcgtgactggtttacattaatcactaaatgaagttttgtttcttcctcttactgttacagtgttgtctttgctgatgacaacatgaattgccaaaggccagggcttatttatattacgtgtgccatttctctggctgagtatatagtcagtaccgagtggtaaattaaagattcccaaaagacaagtgtacttggctccattatattactatgatgaatctgccattaatacattctaattgttttacttttatagacataaaatcagtccccttagtgactaataatagggtttattgattttactaaacattactcattccaggcctgctcatatcagcttgtcctgaacatatgcaaaaagcctgcagtgctgacacagtgcaaattaacttcatggagaaatgggagtgaagagttgtttacagctgtggtccccttgaatacagaatattaaaaaccaggtaataggctccatacagaaccatttattcctagattacaatctcagatgactttttcatggaaacttgccattgctgttcagcccaggtcattaacacttgcagagtaaaacgtgtggccttatacattcacactggctgtgaccctgatttagtgtggtttcagcccaagggtctgtgagtaaccagaatgaatagctctgattgatgcaggataaaaacagcagtttaaatgataattactggtcatttcattccttccctgactctgaaagagacaagacaggcaaagccatttattattgtttttgtcactaaccacagtcatccattccctgctttttgcagtagcctgagtcataaatgttgtttactttcagttaactttagaagagaaaacaaagcaaggcccccagtctgacttttcatttttcttaacaaaatcactctttaaagcaaggggtgagttctcaaccttggcactattgacatatgggaccagataattctttgctgtgggggaactgttctgtgcattgtagtatatttagcagtactcctgacctctactctggagataccagtagcaacctccccaacaaattgtgacaaccaacaggtcgtatgaaatttagaactcatgcctagcccctgccccacaggtagagtgctgagttctatcgttctttgttgcttttggagataggaaagccatcgatgtttccttgtaactcgatgtaaacagaatggggatgctcatttgaccaatgtggataaagttggaccagacctctagctctttaaaaagaattggatgacccagattttaacataataattagtagttcttttaggttgaagatgaattcaattttaaaaccacatctgagggctggattcatttcacagcacgtcaattagcagtgctagcccactaaaaatacatattatttcttctggaatgaaggctgtcagtggaaaacctggaaaaaaatggataaatcttaattgagttgctgggattgaattcagattttcttcacacagggagaggcatttctttcatacacaggaacaaactttgagagattctcacatacactatacatttcagtgaagtttttttttttcacttagacatttgaaaataaaatgaaaggaaacatcaaaatctgcaatatggagaaagttaaagtatccagggctatcatgaacacaaggcatgataacacccatggacaagtctaggtttaggtctgatcagactggcctgacccttggccagctgttgtcatgttcctgtctacctggaatggcaagtagtacgatggaacaaagcttctttcctgtgtccataacggacgtggctaatcattgccgcattctctccacctgaatgtgtgtgagacctcataacaagtttctcagtgcagctttcccagtagtccctaaaaaacagaccaaagttgacacgcaacatgaaggctgtttgccacctctgcaagaaactaaactcttatgggactaaatcatgacccctataactttcaagggtgtcaccctcacaaccccccaatttcaggcaaggagacttaacatggcactattcctcctttcaactattggaaactttggaagttatttatttaccttcagtgttttaaagcactgatttcttcagtcagaaaagttggggaaccagaatcgttacttattgacccaactttctactgatttatggaggtgttatctttttctcttttactttcatgctatcatcacatctttggctctcctgccaccctcttataatgatctttgattagatagaatccatccaaataatccagtatcatctccttctctcaacgtcacctgattaacaattttagttccatctgcaatcttaattcccctttgccacgtaacaacagtttcacagattctggggattaggacatggacatctttgggggctaccactctacctgccacaccacccaacacaaatccctttctgcctgggcagtattaacacaataacaatagtataatagttctactgtataatatacaatattacaactggtataatgaccatcatcaaaattatagtatatttactttgcacttcacatgtaagaactcatttagttctcataatcacccaattactattcgcattttagagctggaaaaactgaggcatcaagctaaagtaatttgcccaagttcacaccactgtgtaagtgacaggaccataacccctatgttatactgcttcagagaagggataatacactccctagggaattgacaagattttcctttgctaaagtgcttattatttcagaggggaaaataatggtgtgtctctccaggctgctatgagacaaagcctctgtgcagcctgtgctggagccaggcatcaagcccttgttaaactccacattccaggcccaggatcctgagagcctagcggctcttcagtgcattgctggcagaggttgctgaaaaggttaccttttttttgttttctcattgtcatggcagcccttgcctctttcaatactctaccatatgtatctgatgactagaagctcagaatacaagagttgggcttcacgggaactggtgcttgggtgtcagaggctggtgggaaggctgatgcttttgtgattctggcagagactatcatgggctcctacaaagggtcattccaacgttctgacaaagggccccaaatttgtactttcaattatctacaaatgatgtcattctcactgtctcaggggatttttgaaaatattagaaagaaggatgctcaaacctcagctttaactctttaaataccctcccctaaccagatccttctccagtgtattttgtgtgtactgagggacaagggaatatgtgaaacatacttacttgcaagatgtaaacatttaaattataatttctgcaatgttatattgaaattgcttctttatttcgatatggtgagagcctcaaaaaatgaatgcctagatttttcttggcttctcagaggactttgctctaaatagtatgtgttggggcaaaatacagaaattgattgaaaaattcttcctaataagggtggcaggggccactgaatcaagacatcctggccccatttaatcactggaggtcactgaactataggtctgaaagagaaagtagttccatcttcctcaccactctccagagaaggtagtccagccacccaacctagaccagatcggaattttccagggtgggggaagtggggtggaatccctagcctagtagggatgacctttcagcgtaataaccatggagagggagactgtttctagcaaggctgctgtacagctggatgttttcagctgcctgtaacagaaaccatgactgaaactgccatcaactgcaaggaaatgtgttctctccccaatgctgagccaagagcagggtaatctccagacatcatcctgcatgctgctgactctgcttctctgtgatactctttgctcagtcttccttgggcttgtcccctgtgttatggccacatgagttccagatctctctctggagacatcaatgtccaggggagagaactgtgtcttcctgtgtctcttaggagggaagaaaccttcctcagatgcctctggcaggcatctctcccatatccttggccagaaccaggccacatggtgactcctgaaacattacaggaagagaatgggattgccatgagttcctcaggctaagaaggatgagaatctgcccctgagtcatgcatgggaggagtggctcatggcttagaactaggattctgttggggagaacgaagcgggggatgaatgttttgtctgaggcatgaaactttctttgaggccagtgaaacgtggtagaatctcttagtgtcctctgggttctcctgaggtgtgagtctgggatgggtgctggtgggaggcagacagttgtttacactccagcagaactcacagagaccctccgctgtaactgacttttccttagagaatctggtgattgggtagaattaggatagcgggcacagggctgcactgaacgcactgttccgaaggaacatgaagagattcagaaacctaccgtctttcttttctctctcttccatgacacagctgagtaagactctatgggtaggaggaaaggtgccactctcttccaccattccctagcacacacgcacacatgcatacacacacacacacacacacacacacacacacacactctgctcttcagaggttccccagaacttacagcctataagaaagaacagggacctaccttctcccccaaagcaagttctgcactctggacagaaaagaggaactcaggaccatttttactagaatttagacataattaggaggggtgggtggaggggtgaagggactggaatgttaggaagggcaagcgttgagccctggtataccaaaattggaaagagaaagaacaaattagcccactggcagagggagaatctcaccatatcaggaacaagggagattccttcaggagaaagagaaaccaggctttagcttggggtctctgacttagagttatcaacgttaggaaagggcgttgaccaagtctcagaaagccatctcactcttgctggaagggaaagaatgggtgggcaacccctagaacttccagctgggtgggggcataatcctctctgcctttggccctctctccactctcagcagagcagaatgtgtctggtagggaagaagataaaggactggcctcattttcctgcccctctaccaacctgaatttgtccctgattgggtgagtggtgggcgagtgacccacccagcagatctagtgactgcaaacccttggggtagggttaattccttcaaaagaaggaattttgaaagtgggtgagcaggtcatgagacagaattcattcaggaagtatttcctgagtacctgtgaggggcctaggtactgggtgcccaggtcctgtgtcctggggatagggtgcccaggccctgccctctcccacttatagacagagtggggcaccccctcccacctctggatgagcacatagatgtctccgtaaagctgagcaaagctgaactctgcagacctagtgctggccaagaaggtctgccatgaagacaagcactcactgtgagactctgcctcgaaagctcataaacctgggagcctgctgtgctcagcctcagaaacccccaggtgcccgtgtgtctgccatccccagcccccaccatcccctcagtgataagatactgggaggcagaccataaaaggtggattttgtgacaacagctcggtgaccagaccgttccctctgctgagggctgctgagggctgaagcagggatgactcatggagaggccccagcagacagccgaggaagcctctgaccctgcggtgctgtgggctgggccatcacgggacactggggagccacagatgtgctcagaggtagggatatgcggtgagtcactccacccctgtcaggcactggcagggagctgaggagtcagaagcagagagagccagcgccgagctcgcccggtgcctgtgagcagccagcctctaaatggcttccagcttgacagtcctcacactgtggcaatgtagcttctggaagcctatggggcccagggacattcctctgactgactccagtggatgaggtgtgctcagggtgtggtgggtgagcaagtggccttcccgggtcagctagagggactcccttgtcatcgtccagtggtggaaattgatgaattggcacctaacatgaatgcgatatcctcctgggaggctgagaatctctaatcttgtcccactcgatgtcagcaactccgcaggcctggaagcctccctctgaatgcttagcagggctcccctgtgtatctcctgctttccagggccactgtgccttggtcaaggatgtttaaggcgtaaatcacagaaatctattcaagcaaatgtaagcaaagtagacagatgtaagaacagaggggttcttacaggagcaagggtggcaagtgtgtccaagcttactaggggctggcactggtgggacctgggaggtctaggcaccatggaagcttctctctcacacacatcgtggcttgttttgtcgctgttactcctcctctgcctcattcctctctctgcacactggctctctctgattctccaaacacatgacctcgcctgactggcaatactctctgtcatcttccagttctaattgcagattctcaagagaaaggatggaagtggccaggcccaggggccacaggatagaatgaacttgctgagggagtggaggctgggcagtgtggggcgggaacagttgctaagctggctcctatttttggcttcttttgactccccacaccactttcatctaagccctttgtcgaaggaatatttatgactaggagcagaagttcacgcaaaccagcttagttacaaagaaggtttattgaaagcgtataagaatccgtctcactatccaaggataggaagggaattggcaggtcatagtggttgttggtgtctagaaaatccctaaatctcgctcaaatatcacataatctcttaccccttcttctcttggtgtctctgtcccgttctcccgcttctgcagacagaccgtttctacctctttgtgacttccctattcttgtaattgaacgtggcctgaaattgctatggagctcacaagggctcgtttctcaccatcatttaactgacctagcctttcagtttgcactccaaattcctgtgccaagtgcagtggatttccatccaaggaataaccaaatgtggctgggccggatttgggagaggcgtatggaattatataggactgtcaacactcctgtgattccaagggttttaggagctctgtgccagcaattgtggggtggcaaagaccatatacatatatacatgtgaacaagtggttttttcgggtcagctagagggactacatatacatatatatgtgcatatatatgtatatatagtctacatatacatatatgtgtatatatatacatatgtatgtatatatacacacacatatatacatatatgtatatatacacacacatatacatatatgtatatatacacacacacatatatacatatatgtatatatacacacatatatacatatatgtatagtgtatatatgtatgtatatactatatagtgtatatatagtgtatacaagtatatatatatatacacttattttttataccacaaaatagaaatgtcccccttttccctgagtgcttcctcttttgtcgtactttactttttccat

SEQ ID NO: 821 - DNA, 4284 bp, Homo sapiens
cagcaccagcacctctgccgccaccgcgggggcaggctcctgtgggaaaagcaaagaggagaagccaggtaaaagccagagcagccgaggcgccaagcgggataaggatgcggggaaatccaggaaggacaagcacgacctgcttcagggccaccagaatggcagtggcagccaggccccttccggggggcacctctatggctttggggccaagagcaatggaggtggcgcgagccccttccactgcgggggcactgggagtggcagcgtcgccgctgcaggggaagttagcaaaagtgccccggattcagggctcatgggaaactctatgttggtaaagaaggaagaggaggaggaggagagccacaggcgaatcaagaaactgaaaactgagaaggttgaccccctgtttacagtgccagcgccaccaccgccgatttccagcagtctcacgcctcagattctaccctcctacttttccccatcttcatccaatattgcagcaccggttgaacagcttttggttcggactcgttctgtgggtgtcaatacatgtgaagttggagtagtgacagagccagagtgtcttgggccctgtgaacctgggaccagtgtgaatttggaagggatcgtgtggcatgaaacagaagaaggtgtcctagtggtcaatgtcacgtggaggaacaaaacgtacgtgggaaccctactggactgcaccaagcacgactgggcccctcccaggttttgtgagtcaccgacaagtgacctggagatgagagggggccggggcagagggaagagagcgaggtctgctgctgctgccccgggctccgaggccagcttcacagagtccagagggctgcagaataagaacagagggggggccaatgggaaagggaggcggggcagcctcaatgccagcggacgaaggacacccccaaattgtgctgctgaggatatcaaagccagcccttcctccaccaacaaaaggaaaaacaagcctccaatggagctggacctgaactccagctctgaggacaataagcctggaaagcgtgtccgcacaaattccagaagcactcccactacccctcaagggaaaccagagactacttttttggaccaaggctgctcttctccagtgttaatcgactgtccccacccaaactgcaacaaaaagtacaagcacattaacggcctgaggtaccaccaggctcatgcacacttagacccagaaaacaagctggagttcgagcctgacagtgaggacaagatctcggactgtgaggaaggattgagtaatgtggcacttgaatgcagtgagccaagcacaagtgtatctgcttatgaccagttgaaggcaccggcatcccctggtgctggaaacccacctgggaccccaaagggaaagagagagctgatgagcaatggcccaggttccattattggtgctaaagctgggaagaattctggcaaaaagaagggccttaacaatgaactgaacaaccttccagtaatctccaacatgacggctgcgttagacagttgctcggcagcagacggcagtttggctgctgagatgcctaaactggaagcagaaggattaattgacaagaaaaatttaggagataaagaaaagggcaaaaaagctaccaactgcaaaacggacaaaaacctctctaaactgaaaagtgcccggcccattgcccctgccccagcccccactcccccgcagctaatcgctatacccactgcaacctttacaacgaccaccactgggacaatacccggactgccctccctcacaacaactgttgttcaggctacaccaaagagtcctccgttaaaacccattcaaccaaagcccacaattatgggagagcccatcaccgtgaacccagctctggtgtcactcaaagacaaaaagaaaaaggagaagcgaaagctaaaggacaaagaagggaaagagacgggaagcccaaaaatggatgccaagctggggaaactagaggactccaagggggccagcaaagatttacctgggcattttttaaaggatcatctcaacaagaatgaagggctggcaaatggactgtcggagtctcaggagagccgcatggccagtatcaaagctgaggccgataaggtttacactttcacagacaacgctcccagcccttccatagggagcgcctcgaggctggaatgcagcactttggtgaacgggcaggcaccaatggcacctctgcatgtgttgacccagaatggggcagagagttcagctgcaaagacaagcagcccggcctattcagacatatctgatgctgctgacgatggtggttctgacagcaggtcggagggtatgagatcaaaggccagttccccatcagatattatttctagtaaggacagtgttgtaaaagggcattcttcaactacagcacaatcatctcaactgaaagagtcccattctccctattaccacagctatgatccttattattctccaagttacatgcaccctgggcaggtcggtgcccctgcagctggaaatagtgggagcacgcagggaatgaagatcaagaaggagtctgaggaagatgctgaaaagaaagacaaggcagagcagttagattctaagaaagtggaccacaattctgcatccttacagcctcagcaccagtcggtgatcacacaaagacatcctgccctggctcagtcactttattatggccagtatgcatatgggctctatatggaccagaagtctctgatggccaccagccctgcctatagacagcagtatgagaagtactatgaggaccagaggctggcagagcagaaaatggcccagactgggagaggagactgtgaaaggaaaagtgagctccccttgaaagagctgggcaaggaggaaactaaacagaaaaatatgccatcggccacaatctcaaaagctccctctactccggagcctaacaaaaaccattctaaactagggccatcagtgcctaataaaactgaggagacaggacccagattcaagaacatggcatcattatgtataccagcccaaatatctggatcagcaaaagtcagaagaacttgatagagagaagaaattaaaagaggatagtccgaggaaaactcctaataaagagagtggtgtgcccagccttcctgtatcgttaacaagcattaaagaggagcccaaagaggccaagcatcctgattctcaatcaatggaggagagcaagctgaaaaatgatgatcgaaagactcctgtgaactggaaggactctcggggaacaagagtggctgtctcctcacccatgagtcagcatcagtcatacatacagtacttgcatgcttatccttacccacagatgtacgaccccagccatcctgcataccgggctgtttctcccgtcctaatgcacagttatcctggcctgtggaaaaggctacagctgagcgggaacgggaggcagaaagggaaagggatcgccactcccccttcggccagcggcacctgcacacgcaccaccacacccacgttggcatgggttacccgctaatcccgggtcaatatgacccttttcaaggcttgacctctgctgcccttgttgcctctcagcaggtggctgcccaggcatctgcatctggaatgtttcctggacaaagaagataaagtcgcaaatggagacatttattttcataatgctaaagagaataacaagattggacatgtacattgtcatgtgactggatcacatggggaagcgctttatacagacatcagttccatggtgttaatttgaaatgccttaatggcaggcaaaaaccagtcatttcatttttgtaaattacagattttatcacagagtaacaaatgttgctgtaattaaacttctgttttatatatatatacgtatacatatctgtatatatacatatatatatatataaatataaatatattctttactttttgtatcagtaaccaggctcgcacacacagggtctgctgccacgtcgcaaaccactcagtaaaggaaattaaaaatgtatttgtcatgttaaaaagtgttagccacaaaaggctacttactttcttttccttttcctttaaaattgtaaataaataatgttatgtatcagtgtgcctgaaccttgcatatccttcacatatttcccataagcccctcagaaaggctaactgtgatgatgacactttggtacaatttagatgtctatttggtggctcctgttaaagacgcacca

SEQ ID NO: 822 - protein, 918 aa, Homo sapiens
MGNSMLVKKEEEEEESHRRIKKLKTEKVDPLFTVPAPPPPISSSLTPQILPSYFSPSSSNIAAPVEQLLVRTRSVGVNTCEVGVVTEPECLGPCEPGTSVNLEGIVWHETEEGVLVVNVTWRNKTYVGTLLDCTKHDWAPPRFCESPTSDLEMRGGRGRGKRARSAAAAPGSEASFTESRGLQNKNRGGANGKGRRGSLNASGRRTPPNCAAEDIKDSSTNKRKNKPPMELDLNSSSEDNKPGKRVRTNSRSTPTTPQGKPETTFLDQGCSSPVLIDCPHPNCNKKYKHINGLRYHQAHAHLDPENKLEFEPDSEDKISDCEEGLSNVECSEPSTSVSAYDQLKAPDGAGNPPGTPKGKRELMSNGPGSIIGAKAGKNSGKKKQNELNNLPVISNMTAALDSCSAADGSLAAEMPKLEAEGLIDKKNLGDKEKGKKATNCKTDKNLSKLKSARPIAPAPAPTPPQLIAIPTATFTTTTTGTIPGLPSLTTTVVQATPKSPPLKPIQPKPTIMGEPITVNPALVSLKDKKKKEKRKLKDKEGKETGSPKMDAKLGKLEDSKGASKDLPGHFLKDHLNKNEGLANGLSESQESRMASIKAEADKVYTFTDNAPSPSIGSASRLECSTLVNGQAPMAPLHVLTQNGAESSAAKTSSPAYSDISDAADDGGSDSRSEGMRSKASSPSDIISSKDSVVKGHSSTTAQSSQLKESHSPYYHSYDPYYSPSYMHPGQVGAPAAGNSGSTQGMKIKKESEEDAEKKDKAEQLDSKKVDHNSASLQPQHQSVITQRHPAQSLYYGQYAYGMDQKSLMATSPAYRQQYEKYYEDQRLAEQKMAQTGRGDCERKSELPLKELGKEETKQKNMPSATISKAPSTPEPNKNHSKLGPSVPNKTEETGPRFKNMASLCIPAQISGSAKVRRT

SEQ ID NO: 823 - DNA, 3631 bp, Homo sapiens
cagcaccagcacctctgccgccaccgcgggggcaggctcctgtgggaaaagcaaagaggagaagccaggtaaaagccagagcagccgaggcgccaagcgggataaggatgcggggaaatccaggaaggacaagcacgacctgcttcagggccaccagaatggcagtggcagccaggccccttccggggggcacctctatggctttggggccaagagcaatggaggtggcgcgagccccttccactgcgggggcactgggagtggcagcgtcgccgctgcaggggaagttagcaaaagtgccccggattcagggctcatgggaaactctatgttggtaaagaaggaagaggaggaggaggagagccacaggcgaatcaagaaactgaaaactgagaaggttgaccccctgtttacagtgccagcgccaccaccgccgatttccagcagtctcacgcctcagattctaccctcctacttttccccatcttcatccaatattgcagcaccggttgaacagcttttggttcggactcgttctgtgggtgtcaatacatgtgaagttggagtagtgacagagccagagtgtcttgggccctgtgaacctgggaccagtgtgaatttggaagggatcgtgtggcatgaaacagaagaaggtgtcctagtggtcaatgtcacgtggaggaacaaaacgtacgtgggaaccctactggactgcaccaagcacgactgggcccctcccaggttttgtgagtcaccgacaagtgacctggagatgagagggggccggggcagagggaagagagcgaggtctgctgctgctgccccgggctccgaggccagcttcacagagtccagagggctgcagaataagaacagagggggggccaatgggaaagggaggcggggcagcctcaatgccagcggacgaaggacacccccaaattgtgctgctgaggatatcaaagccagcccttcctccaccaacaaaaggaaaaacaagcctccaatggagctggacctgaactccagctctgaggacaataagcctggaaagcgtgtccgcacaaattccagaagcactcccactacccctcaagggaaaccagagactacttttttggaccaaggctgctcttctccagtgttaatcgactgtccccacccaaactgcaacaaaaagtacaagcacattaacggcctgaggtaccaccaggctcatgcacacttagacccagaaaacaagctggagttcgagcctgacagtgaggacaagatctcggactgtgaggaaggattgagtaatgtggcacttgaatgcagtgagccaagcacaagtgtatctgcttatgaccagttgaaggcaccggcatcccctggtgctggaaacccacctgggaccccaaagggaaagagagagctgatgagcaatggcccaggttccattattggtgctaaagctgggaagaattctggcaaaaagaagggccttaacaatgaactgaacaaccttccagtaatctccaacatgacggctgcgttagacagttgctcggcagcagacggcagtttggctgctgagatgcctaaactggaagcagaaggattaattgacaagaaaaatttaggagataaagaaaagggcaaaaaagctaccaactgcaaaacggacaaaaacctctctaaactgaaaagtgcccggcccattgcccctgccccagcccccactcccccgcagctaatcgctatacccactgcaacctttacaacgaccaccactgggacaatacccggactgccctccctcacaacaactgttgttcaggctacaccaaagagtcctccgttaaaacccattcaaccaaagcccacaattatgggagagcccatcaccgtgaacccagctctggtgtcactcaaagacaaaaagaaaaaggagaagcgaaagctaaaggacaaagaagggaaagagacgggaagcccaaaaatggatgccaagctggggaaactagaggactccaagggggccagcaaagatttacctgggcattttttaaaggatcatctcaacaagaatgaagggctggcaaatggactgtcggagtctcaggagagccgcatggccagtatcaaagctgaggccgataaggtttacactttcacagacaacgctcccagcccttccatagggagcgcctcgaggctggaatgcagcactttggtgaacgggcaggcaccaatggcacctctgcatgtgttgacccagaatggggcagagagttcagctgcaaagacaagcagcccggcctattcagacatatctgatgctgctgacgatggtggttctgacagcaggtcggagggtatgagatcaaaggccagttccccatcagatattatttctagtaaggacagtgttgtaaaagggcattcttcaactacagcacaatcatctcaactgaaagagtcccattctccctattaccacagctatgatccttattattctccaagttacatgcaccctgggcaggtcggtgcccctgcagctggaaatagtgggagcacgcagggaatgaagatcaagaaggagtctgaggaagatgctgaaaagaaagacaaggcagagcagttagattctaagaaagtggaccacaattctgcatccttacagcctcagcaccagtcggtgatcacacaaagacatcctgccctggctcagtcactttattatggccagtatgcatatgggctctatatggaccagaagtctctgatggccaccagccctgcctatagacagcagtatgagaagtactatgaggaccagaggctggcagagcagaaaatggcccagactgggagaggagactgtgaaaggaaaagtgagctccccttgaaagagctgggcaaggaggaaactaaacagaaaaatatgccatcggccacaatctcaaaagctccctctactccggagcctaacaaaaaccattctaaactagggccatcagtgcctaataaaactgaggagacaggtaaatcgcagcttctctccaatcaccagcagcagcttcaggccgacagcttcaaagctaagcagatggaaaaccaccagcttattaaggaggctgtagaaatgaagtctgtcatggactctatgaagcagacaggtgtagacccaacctcgagatttaaacaagacccagattcaagaacatggcatcattatgtataccagcccaaatatctggatcagcaaaagtcagaagaacttgatagagagaagaaattaaaagaggatagtccgaggaaaactcctaataaagagagtggtgtgcccagccttcctgtatcgttaacaagcattaaagaggagcccaaagaggccaagcatcctgattctcaatcaatggaggagagcaagctgaaaaatgatgatcgaaagactcctgtgaactggaaggactctcggggaacaagagtggctgtctcctcacccatgagtcagcatcagtcatacatacagtacttgcatgcttatccttacccacagatgtacgaccccagccatcctgcataccgggctgtttctcccgtcctaatgcacagttatcctggtacgtgttgtcggttc

SEQ ID NO: 824 - protein, 1093 aa, Homo sapiens
MGNSMLVKKEEEEEESHRRIKKLKTEKVDPLFTVPAPPPPISSSLTPQILPSYFSPSSSNIAAPVEQLLVRTRSVGVNTCEVGVVTEPECLGPCEPGTSVNLEGIVWHETEEGVLVVNVTWRNKTYVGTLLDCTKHDWAPPRFCESPTSDLEMRGGRGRGKRARSAAAAPGSEASFTESRGLQNKNRGGANGKGRRGSLNASGRRTPPNCAAEDIKDSSTNKRKNKPPMELDLNSSSEDNKPGKRVRTNSRSTPTTPQGKPETTFLDQGCSSPVLIDCPHPNCNKKYKHINGLRYHQAHAHLDPENKLEFEPDSEDKISDCEEGLSNVECSEPSTSVSAYDQLKAPDGAGNPPGTPKGKRELMSNGPGSIIGAKAGKNSGKKKQNELNNLPVISNMTAALDSCSAADGSLAAEMPKLEAEGLIDKKNLGDKEKGKKATNCKTDKNLSKLKSARPIAPAPAPTPPQLIAIPTATFTTTTTGTIPGLPSLTTTVVQATPKSPPLKPIQPKPTIMGEPITVNPALVSLKDKKKKEKRKLKDKEGKETGSPKMDAKLGKLEDSKGASKDLPGHFLKDHLNKNEGLANGLSESQESRMASIKAEADKVYTFTDNAPSPSIGSASRLECSTLVNGQAPMAPLHVLTQNGAESSAAKTSSPAYSDISDAADDGGSDSRSEGMRSKASSPSDIISSKDSVVKGHSSTTAQSSQLKESHSPYYHSYDPYYSPSYMHPGQVGAPAAGNSGSTQGMKIKKESEEDAEKKDKAEQLDSKKVDHNSASLQPQHQSVITQRHPAQSLYYGQYAYGMDQKSLMATSPAYRQQYEKYYEDQRLAEQKMAQTGRGDCERKSELPLKELGKEETKQKNMPSATISKAPSTPEPNKNHSKLGPSVPNKTEETGKSQLLSNHQQQLQADSFKAKQMENHQLIKEAVEMKSVMDSMKQTGVDPTSRFKQDPDSRTWHHYVYQPKYLDQQKSEELDREKKLKEDSPRKTPNKESGVPSLPVSLTSIKEEPKEAKHPDSQSMEESKLKNDDRKTPVNWKDSRGTRVAVSSPMSQHQSYIQYLHAYPYPQMYDPSHPAYRAVSPVLMHSYPGTCCRF

SEQ ID NO: 825 - DNA, 4449 bp, Homo sapiens
cagcaccagcacctctgccgccaccgcgggggcaggctcctgtgggaaaagcaaagaggagaagccaggtaaaagccagagcagccgaggcgccaagcgggataaggatgcggggaaatccaggaaggacaagcacgacctgcttcagggccaccagaatggcagtggcagccaggccccttccggggggcacctctatggctttggggccaagagcaatggaggtggcgcgagccccttccactgcgggggcactgggagtggcagcgtcgccgctgcaggggaagttagcaaaagtgccccggattcagggctcatgggaaactctatgttggtaaagaaggaagaggaggaggaggagagccacaggcgaatcaagaaactgaaaactgagaaggttgaccccctgtttacagtgccagcgccaccaccgccgatttccagcagtctcacgcctcagattctaccctcctacttttccccatcttcatccaatattgcagcaccggttgaacagcttttggttcggactcgttctgtgggtgtcaatacatgtgaagttggagtagtgacagagccagagtgtcttgggccctgtgaacctgggaccagtgtgaatttggaagggatcgtgtggcatgaaacagaagaaggtgtcctagtggtcaatgtcacgtggaggaacaaaacgtacgtgggaaccctactggactgcaccaagcacgactgggcccctcccaggttttgtgagtcaccgacaagtgacctggagatgagagggggccggggcagagggaagagagcgaggtctgctgctgctgccccgggctccgaggccagcttcacagagtccagagggctgcagaataagaacagagggggggccaatgggaaagggaggcggggcagcctcaatgccagcggacgaaggacacccccaaattgtgctgctgaggatatcaaagccagcccttcctccaccaacaaaaggaaaaacaagcctccaatggagctggacctgaactccagctctgaggacaataagcctggaaagcgtgtccgcacaaattccagaagcactcccactacccctcaagggaaaccagagactacttttttggaccaaggctgctcttctccagtgttaatcgactgtccccacccaaactgcaacaaaaagtacaagcacattaacggcctgaggtaccaccaggctcatgcacacttagacccagaaaacaagctggagttcgagcctgacagtgaggacaagatctcggactgtgaggaaggattgagtaatgtggcacttgaatgcagtgagccaagcacaagtgtatctgcttatgaccagttgaaggcaccggcatcccctggtgctggaaacccacctgggaccccaaagggaaagagagagctgatgagcaatggcccaggttccattattggtgctaaagctgggaagaattctggcaaaaagaagggccttaacaatgaactgaacaaccttccagtaatctccaacatgacggctgcgttagacagttgctcggcagcagacggcagtttggctgctgagatgcctaaactggaagcagaaggattaattgacaagaaaaatttaggagataaagaaaagggcaaaaaagctaccaactgcaaaacggacaaaaacctctctaaactgaaaagtgcccggcccattgcccctgccccagcccccactcccccgcagctaatcgctatacccactgcaacctttacaacgaccaccactgggacaatacccggactgccctccctcacaacaactgttgttcaggctacaccaaagagtcctccgttaaaacccattcaaccaaagcccacaattatgggagagcccatcaccgtgaacccagctctggtgtcactcaaagacaaaaagaaaaaggagaagcgaaagctaaaggacaaagaagggaaagagacgggaagcccaaaaatggatgccaagctggggaaactagaggactccaagggggccagcaaagatttacctgggcattttttaaaggatcatctcaacaagaatgaagggctggcaaatggactgtcggagtctcaggagagccgcatggccagtatcaaagctgaggccgataaggtttacactttcacagacaacgctcccagcccttccatagggagcgcctcgaggctggaatgcagcactttggtgaacgggcaggcaccaatggcacctctgcatgtgttgacccagaatggggcagagagttcagctgcaaagacaagcagcccggcctattcagacatatctgatgctgctgacgatggtggttctgacagcaggtcggagggtatgagatcaaaggccagttccccatcagatattatttctagtaaggacagtgttgtaaaagggcattcttcaactacagcacaatcatctcaactgaaagagtcccattctccctattaccacagctatgatccttattattctccaagttacatgcaccctgggcaggtcggtgcccctgcagctggaaatagtgggagcacgcagggaatgaagatcaagaaggagtctgaggaagatgctgaaaagaaagacaaggcagagcagttagattctaagaaagtggaccacaattctgcatccttacagcctcagcaccagtcggtgatcacacaaagacatcctgccctggctcagtcactttattatggccagtatgcatatgggctctatatggaccagaagtctctgatggccaccagccctgcctatagacagcagtatgagaagtactatgaggaccagaggctggcagagcagaaaatggcccagactgggagaggagactgtgaaaggaaaagtgagctccccttgaaagagctgggcaaggaggaaactaaacagaaaaatatgccatcggccacaatctcaaaagctccctctactccggagcctaacaaaaaccattctaaactagggccatcagtgcctaataaaactgaggagacaggtaaatcgcagcttctctccaatcaccagcagcagcttcaggccgacagcttcaaagctaagcagatggaaaaccaccagcttattaaggaggctgtagaaatgaagtctgtcatggactctatgaagcagacaggtgtagacccaacctcgagatttaaacaagacccagattcaagaacatggcatcattatgtataccagcccaaatatctggatcagcaaaagtcagaagaacttgatagagagaagaaattaaaagaggatagtccgaggaaaactcctaataaagagagtggtgtgcccagccttcctgtatcgttaacaagcattaaagaggagcccaaagaggccaagcatcctgattctcaatcaatggaggagagcaagctgaaaaatgatgatcgaaagactcctgtgaactggaaggactctcggggaacaagagtggctgtctcctcacccatgagtcagcatcagtcatacatacagtacttgcatgcttatccttacccacagatgtacgaccccagccatcctgcataccgggctgtttctcccgtcctaatgcacagttatcctggtcctgtggaaaaggctacagctgagcgggaacgggaggcagaaagggaaagggatcgccactcccccttcggccagcggcacctgcacacgcaccaccacacccacgttggcatgggttacccgctaatcccgggtcaatatgacccttttcaaggcttgacctctgctgcccttgttgcctctcagcaggtggctgcccaggcatctgcatctggaatgtttcctggacaaagaagataaagtcgcaaatggagacatttattttcataatgctaaagagaataacaagattggacatgtacattgtcatgtgactggatcacatggggaagcgctttatacagacatcagttccatggtgttaatttgaaatgccttaatggcaggcaaaaaccagtcatttcatttttgtaaattacagattttatcacagagtaacaaatgttgctgtaattaaacttctgttttatatatatatacgtatacatatctgtatatatacatatatatatatataaatataaatatattctttactttttgtatcagtaaccaggctcgcacacacagggtctgctgccacgtcgcaaaccactcagtaaaggaaattaaaaatgtatttgtcatgttaaaaagtgttagccacaaaaggctacttactttcttttccttttcctttaaaattgtaaataaataatgttatgtatcagtgtgcctgaaccttgcatatccttcacatatttcccataagcccctcagaaaggctaactgtgatgatgacactttggtacaatttagatgtctatttggtggctcctgttaaagacgcacca

SEQ ID NO: 826 - protein, 1167 aa, Homo sapiens
MGNSMLVKKEEEEEESHRRIKKLKTEKVDPLFTVPAPPPPISSSLTPQILPSYFSPSSSNIAAPVEQLLVRTRSVGVNTCEVGVVTEPECLGPCEPGTSVNLEGIVWHETEEGVLVVNVTWRNKTYVGTLLDCTKHDWAPPRFCESPTSDLEMRGGRGRGKRARSAAAAPGSEASFTESRGLQNKNRGGANGKGRRGSLNASGRRTPPNCAAEDIKDSSTNKRKNKPPMELDLNSSSEDNKPGKRVRTNSRSTPTTPQGKPETTFLDQGCSSPVLIDCPHPNCNKKYKHINGLRYHQAHAHLDPENKLEFEPDSEDKISDCEEGLSNVECSEPSTSVSAYDQLKAPDGAGNPPGTPKGKRELMSNGPGSIIGAKAGKNSGKKKQNELNNLPVISNMTAALDSCSAADGSLAAEMPKLEAEGLIDKKNLGDKEKGKKATNCKTDKNLSKLKSARPIAPAPAPTPPQLIAIPTATFTTTTTGTIPGLPSLTTTVVQATPKSPPLKPIQPKPTIMGEPITVNPALVSLKDKKKKEKRKLKDKEGKETGSPKMDAKLGKLEDSKGASKDLPGHFLKDHLNKNEGLANGLSESQESRMASIKAEADKVYTFTDNAPSPSIGSASRLECSTLVNGQAPMAPLHVLTQNGAESSAAKTSSPAYSDISDAADDGGSDSRSEGMRSKASSPSDIISSKDSVVKGHSSTTAQSSQLKESHSPYYHSYDPYYSPSYMHPGQVGAPAAGNSGSTQGMKIKKESEEDAEKKDKAEQLDSKKVDHNSASLQPQHQSVITQRHPAQSLYYGQYAYGMDQKSLMATSPAYRQQYEKYYEDQRLAEQKMAQTGRGDCERKSELPLKELGKEETKQKNMPSATISKAPSTPEPNKNHSKLGPSVPNKTEETGKSQLLSNHQQQLQADSFKAKQMENHQLIKEAVEMKSVMDSMKQTGVDPTSRFKQDPDSRTWHHYVYQPKYLDQQKSEELDREKKLKEDSPRKTPNKESGVPSLPVSLTSIKEEPKEAKHPDSQSMEESKLKNDDRKTPVNWKDSRGTRVAVSSPMSQHQSYIQYLHAYPYPQMYDPSHPAYRAVSPVLMHSYPGPVEKATAEREREAERERDRHSPFGQRHLHTHHHTHVGMGYPLIPGQYDPFQGLTSAALVASQQVAAQASASGMFPGQRR

SEQ ID NO: 827 - DNA, 254481 bp, Mus musculus
  misc_feature (1)...(254481): n = A, C, G or T/U
tagcggtattagtggaccctcctgggatttcaggcatggggcctacactggcttcccttgtatattctcttacagtatgtatctgcagatgtcttagttagggttttattgctgtgaagagatcacataaccaaggcaaggtcccttagaagggacaacatttcattggagctggcttacagtttcagaggttcagtccattatcttcaagacaggagcaggcagcatccagtcaggcatggtgcaggaggagctgagagttcttctacatattgatccacagacagtaggaggagactgtcttccactgcaaccaggaggaggctctgagtccatactgggtggagcttgagtataggagacctcaatgccctcctgcaccgacttactccctctgttccaacaaggccacacttcataatagtggctaagcattcaaacacatgaatttatggggccaaaccttttcaaaccaccacagcagacttgcattaatttttaaaagtatattctgaagaactccatcttggacactcttcaacatgtgtcaagacactcactcaggggctggagagatggctcagcttttatgagcactgactgctcttccagaggttctgagttcaattcccagcaaccacatggtggctcacaaccatctgtaatgggatcctaagcattcttctggtgtgtccgaagacagctgcagtgtactcacatacataaaaataaagcttacatagatacacagttctcattactgcatggaatgagctctgacagctcaggccagtgttcttcagtgttggagtttctggttcaacaacgtccatgcatctatgtttacactggaaatccttggccaagaaagtgactgtgcacttgttgctgccttggtttgaactttgcacccaacacgtaaatcctgtgcgcttttttcatcagtaaaagtgaattttggactaaacagtctctttcttctgtcgaactcttagcttttgagcttgagagatttgccacagtgtataatacgttttatggatgattttgacgtccagtttgttacgtccaataatttccttatagctaagaatttgagccagtagatatctgtccttgagaaagtaacaacctatagatagaaatatgtaaaatgaactggagagatggctctgtggttaagagtactagctgctcttctagagaaccggggctcaattcccagcacccacaaggcagcttacaatgatctatagtttcagttacagaggatcctatgtcgccttctgatcttctcaggtatgcacatgttggaaagatatatgtgcatgctacacatccatatataaaataaagcaatacattttaaaatttaaaaagagtgtgaaacatcctagtcatattggtgattccctcacttgaggttgcactttcttctacggtttgctttgtgaataaatggaatatttgtaactacgactatctcttagtcactgttcttttgctgtgatgaaacaccatgaccaaaagcaagttggggagggaaggctctattcagcttatgcctgcatatcagtatcagtattcatcaaaggaagtcaggtcaggaacccaaacagggcaggaacctggaggtaggagctgatgcagaggccatggagggtgctgctcactgccttgctcctcatggcttagtcagcctgctttcttagagaacccaggaccaccagcccaacaatgacatcacccacaatggcctagaccctcctccattgatcacaaattaagaaaatgtcctacaggcctgcctaagaccccatcttatggaggcattttcttgattgaggctccctcctctcagatgactgtagcttgtgtcaaggtgacgtatggctacccagcacagactaagggtagcatttcacttatcgcttattttcagaattagacgtgaaattgtctgtaagagtgatcagtcagcaatttcagtgtgacattttataaatggtatgatatgctcagtattaactatttaaatgcctttcttgtctcttgcagttgaaaacaaccctcgaacaggaaatcttgctgcgctaactaaggtcttcctatctagaaccagggagctcaggctctcagccgagtgtcagaagtaagttacggctcagcaccaccgcaccatgcttggcgccacggggaatcgtttttatttgatgcaggggataggctgtggtcttttgaaaacccctgtggagaaattatactctctcttttttttttttttttttttttttggtttttcgagacagggtttctctgtatagccctggctgtcctggaactcactctgtagaccaggctggccttgaactcagaaatccgcctgcctctgcctcccaagtgctgggactaaaggcgtgcaccaccacgcccggctatactctttattaagagaaaaaaaagtaagagaagtttttattttaggtcttaaattgttggtgtgagatgcagtgatttgtttgattccagcactttcgttagttattaaaattatattctttaaaatgattagtaattatataattatttttaatccagttttaaaattaatcaattcatttgttttgggtagcacataaaatgggttttatggtgacgtttgtttgctcatgttcatctgccctcctttgtcatgatgtcgttgttactgtaaaaggtgttccctcccgttacctctccttgtgattactaatctagtttaaatagcgacttagattgatatcatctatgccacatctatagctctatgtcctaaatactggatctgtggatgtctgattgtttatgactagagcattgactttgtagcccaggctggaccaggcactctggtgctttaagcttccaggtgctgggatatcaggtggggccgctgtgcctggcgcttataaaattgttatagctagatagtgtcatctgtaagattgtttattgctttgcttaggaagaactatctcaaatcgtcctgtcattaatacaaataacaggcacgatgttgtgttgccacagatgtcccctttggtgacattgtatacttgcatatgttctctttatgctaccatagttttagctttctttgccttcacgtgagacagttataaagctaaggacaaactggttacacctacaggtgccagtgaccgttttaatccagtagacttcactcagtagagttcgatctgagggaagatacagtagctgccactggctctgtgtaactgcaagatgcagacattgtcctatccacagcccgtgcagagccatcctcacattaggaagacacaatgactagaaacaaaccgcccttgcctacgatgaactactgaaggtgaggtgattctggtctttcctttccagccacatcttcatctggcagacacacaatgctctgtttattatttgctgcttgctgaaagtgttcatccgtgagctgtctgaggaagagctgcagcttcattttacatatgaagaaaagtcccccggcagctacagtaagtaataggtccatgcagaccttaggattaaagtaggatctggcctcgtggggaaggaagggtccccctcccagcagtcatctgtgacctccacgtgtgcaccgtggctcctgtgctgctcacacctgctcatcacacacacacacacacacacacctgctcatcacacacacacacacacctgctcatcacacacacacctgctcatcacacacacacacacacacactcannnnnnnnnnnnnnnnnnnnnnnnnnnnnnnnnnnnnnnnnnnnnnnnnnnnnnnnnnnnnnnnnnnnnnnnnnnnnnnnnnnnnnnnnnnnnnnnnnnnnnnnnnnnnnnnnnnnnnnnnnnnnnnnnnnnnnnnnnnnnnnnnnnnnnnnnnnnnnnnnnnnnnnnnnnnnnnnnnnnnnnnnnnnnnnnnnnnnnnnnnnnnnnnnnnnnnnnnnnnnnnnnnnnnnnnnnnnnnnnnnnnnnnnnnnnnnnnnnnnnnnnnnnnnnnnnnnnnnnnnnnnnnnnnnnnnnnnnnnnnnnnnnnnnnnnnnnnnnnnnnnnnnnnnnnnnnnnnnnnnnnnnnnnnnnnnnnnnnnnnnnnnnnnnnnnnnnnnnnnnnnnnnnnnnnnnnnnnnnnnnnnnnnnnnnnnnnnnnnnacacacacacacacacacacacacacacacacacacacactcacacacacacactcacacacactcgcgcacacacacacacacacacacacacacacacacacacacacacactcagcagttaagcatggactttgacaactccaggtggcctgcaacaccatctgtttcctttcttaaagcggccatcaggaaaaggccttcctcctctgccgtctctgtccatcacttgttttgttgctgtaaccaaacacctgacagaatgggaaagaacgggtttcttttgcccggcggagtttgagggtgcattgagtcatggtgggacgtggcgtcatggtggggcgtggtggcagcaggagtacgaggcagctgtcatcttgcatctgcagtaaggaagcccagagagtccattgctggtgctcggctgcttttgcctttgatttggttggtacctcagtccgagggatggtaccacccacttctaatgtggacgctgtgtcacgggcatgcccagaggtctgtctcctgggtgatttgagatttggtcatgttgacaacagtgtaagcatcacaaagtctattccttgtcatcccaacaaacagaccacttactacttattattgttgcatttttagatttatttactttatgtggatgactgttttgcctctgtgtatgtatgtgtaccatgtgtgtacttggtgcctgtgaagggcagaagaaggcatggaatgctctggaactggagttaagggtggttgtgagccatgatgtatgtccaggtcctctctgcaagggtaacaagtgttctttattagtattttatttcaattcactttacacaccaatcacagctcccccaccaatcccacctatacatattcatcctccccactgccccctcctcttctcctcataaaaggggactcccccctgaggtaccactctaccctgggatatctaatcctagcaggcctcccactgaggcctaccaggcattctagataagggagatccaatggcaggcaacagagtcagagatggccccctctccaattgttaggggacccacatgaagaccaagtgtcacatctgctacaaatgtgtaggggccctgcatccagctccttatgctccctggaagtgatcttaagcaccgagacatctctccagcgcctgtgtgtgtgtgtgtgtgtgtgtgtgtgtgtgagagagagagagagagagagagagagagagagagagagagagagagaggctgtgtgcacgatgccatggcatgcaggtgaaggtcagaggacagcatttaggagttcgtttctccttctactgtggggtctgggaacctaactcaggtcatcacgttttgtggcgagtgccattgcctgtaaaacaatctggcctctcctcacatataatatataaccttttagccacgagcttctacctcttacctccatagatgtaaagccatgtcatgatgtgaaactcatttgttccatcctcaagtttccatggtctttaatagtttcagcactgtctaccattccaagtttcttttgtttcttttgagactgaacaggggtgctgctcactggctgtttcccctgtcttgcttagcctgctttcttatagaacccaggaccaccagcccagggatggcaccacccacaaggggcagggccctttcccactgatcgtcattgagaaaatgccttatagcttggtgtcatggaggtgcttgctccactgagactctcttctctctgatgaccctaagtggacacacactcagcaagtgcacttagggatccttctgtcatgactgtaagagcccctggcacacggcggcgtcttttctgtgtgaacacggtaattgcagacatccagaagcattgatgtgcttgggaaggcgtaggtcacagatcctaagtattgcagggcattgacgtagagaagttttgtttttagaaaagaatgagtttgtttccttttctttttgtgattagtttataacagcattttagaatgctaattaagccaggtggtggtggcgaatgcctttaatcccagcacttgggaggcagaggcaggaggatttctgagttcgaggccagcctggtctacagtgtgagttccaggacagccagggctacacagggaaacccagtctcgggaaaaaccaaaaaaaaaaaaaaaaaaaaaaaaaaaaagaatgctaattaaaaatatttaatatgggctggagagatggctcagtggttaagagcactgactcctcttccaaaggtcctaagttcaaatcccagcaaccacatggtggctcgcaaccacccgtaaagcgatctgatgccctcttctggcatatctgaagacagctacagtgtacttatgtataataataaataaatcttaaaaaaaatttaatactttagagtaactccaatgaaaatgagcagaaacattgactccaccaagattttctgaatataggtgtataattgtctgtgtgtgcttcattgtggttctggctggccttgaatgcagtctgcctatgtacctgcctgcctgcctgcctgcctgcctgcctgcctgcctgcctgcctgccttccttccttcctgccttccttccttccttcctaccttccttcctttcacgtgctaggcttgctgctctgcaccaccatgtctacggcatgttctgttttgaagaaacaagtttgttctggctttcaggcaccggaaactgttttggaggtatgtgagtgcccttgatgaaggttttaacgtttgtcattggcgcagtatactttgggcagcattgagaacctggccctgtcctgagtgctgcggagctgcggctaagtctctctttttaccagtgcttttactttgtccttttaaagatttatttttattccctgtgtccggctgtcttgtctgcggtttatatgtgcactgtgtacatacacggtgctggagacggtgatggacagtgtgagcatccttgtggatgctggaaactgcacatgggtcctctgccagaacagccagagcctataactgcagaacggctctccagcctccagctatttattttaatgaatggggtgtgtgtgtgtgtatgaatgtgtatatgtatgtgtgtatatgtgtgagtgtgtgtgtgtgtttgtttcattactgctttgcttctggtgatcagtaagggtctctacttttttgatacataattattagcataaatgataaaaattatctaagccaagaaagtgagagagagagttaagttagctacttttaataacaagcagcaattggaggataaactccaagtggagggctgactgggtatgtaagagtgagtttgaatgcactaagtgtgcttaactgaactgagatcatgaagtaatgaacaagaatcgacgagagcccttcagggtcaggaggatgcagcaggtggtgtgcgtctgtcgccagcctgaagtgcgagggactccagttcaggactatcctaggctacacagtgagctcctttctcaacaaaacaaacgaggctgcatcagagaggcggactgcttagtcaagaagactcggagagtgcttgcttacagaagggtggctgagtctgggttttagcattgggctgccagtgcagtcatcaaagatgaaaatgagaaagaagtgtgttgtgttagagaggcagctcagtggtgagagcactggctgctcttccagaggacccaggtttgaatcccagcactcacatggcagtttaccactttgagggggtcaagctccctcttctgggatctctgtgctgcccgtataccattcatgcacatacaattaaaacgaggtaaccagagaagtgttagaagtattgcactcatttctgaaaacacggagtttgagataatggtcactcatcttggacacgccagtagacagctggtgggagtctgcagctgtggaactctgactgcccgcgtcttgtccaatctgtgaaccgactagagtctgccctgccgagtgtgtgcgtgagagacagtttgacagaaaacaggatggtgtgtgagaggctgaaaggcaatctttggatttaggaatcactagcatgtaagctgtgatggggaggggcgaatggagagaggtggggggaggggagggaaaggagaaaaaacacaccagcctatggcagagtgaatggaaggtgtgtgttctggaggagtgctggcaagagaacagagaatgccaggtagctgtgagactgtacatgacccgaggaaatcatttcatgagggagttgatgtcatgagtgtccagaacccaaaccagacgtcacaaggctatcctctggcttaagcagtttggagtcccttagctgggggctttgggacagaaatgcttgtgttgggatgacagatcacatcctgtccttgccacttacaattctctgaccaggaaagccttcttgtctttggcttttgtttgtaaggattcaaaattcattctggcatctgtggattgacaaggggctgtggggttcatcaggatcaagggcaaagttgtatgaatatttgggggagggatataggtctaaatatctttgcttcaggtggagcagctaaagcagctttttttttttttttttaaattgtatctttgactttatataaaattccatcaaaagaagcagtgggaggtatgagaagtttgaaagttactagcctgtaggagccttaaggttgttggtttgtttttatttttatttttttatgatttttgttggttctttgtgaatttcacattatgtaccccagttccactaattccccccttccctcatacctgccctcttcccttgcaacaccctccctcccctctgccccccagaaaaaaagctacagtgtgtctggaagctacagtgtgtctggaaacagtgttcccttctgtccacacttctttgcttgcacatgttcactgcaatgacccactgatcaggttccaggcctctggcttctgctactctatcaatactggaatctcactgggactcctcttggatgtcctgttgttgccctgtgtcatggaaatcttgtagttttggctctgtaggaccagccccttcatcctctctagcagttcattgatggggtagatgttggggtggaccaattcaaagccctggatctgggcctgagaggatctgagctgctctgcccttcagctctcgtgctctcacacccttggcctggttcactgtcaacccttgcaccagggccagctccacccttctgcccaggcgaggtgctggggctgctctcccgagtgttgcagcaggtgagggccagggcccgctttcttgctctaagattacaagtacatacttgtaatcttagaatttgggggaggcttgccagttgaggactacacagtgagacccaatcttgaaagcaaaaatagagccagtgaggtagttaagcaaatcatgcgtttttctaactctgaaacgcacgtaaaagtagaaggagaaaaccactccacggagttacctcctgcctctcacccgtgtgctgtggcgcgtacaccgatacaaaaggaaaactgtgtcaagttgttgttaaggctgtgctgggtgctggcttgctcaggatctagattttattcagaggttaaaatagtgttggaatatatgtactaataaatttttcttattagaaatgaaaacttaacatctaagtaatttcctcattgtctaccttgtcaaaacaaacctttgtgtgtcttactaggttctgactctgaagaccttctggaagagttgctctgcagcttggtacagttaatcactgatactccactcttgtaagttctgcctgagccgggcttgctctccattctgtaatgaaaatgagaattgactgtgctgaagaggggtgtgtgtgtgtgtgtgtgtttgatggggggtgtggggcaggcagtgttgggtgaattccttattcattctcttctccccttttttgttttctctttcctgacccctcccactctctctgtcgttttgagatagggtcttaccatataactctggttaccctagaatgccctatgtagaccaggctggccttgaacttacaggatccacctgtctctgcctcctgagtgctgggattagaggcatgtgccactatgcccagctccccatattttctgagacaggctcttttatggaaccttgacttctttgacgtggctatactgccaggccagcaagcctcaggatccgcactgtggttgcaggcctgcgccatcaaactcggatttgttgtgggtgctgaggatcctaattgaggatctactgagctatctgcccaagccctgtgttgaagagcttgtaggttctggtatagtgtgtaaggattgcacactcataccattctttctattctgcctggtgtctgtagactgtgtctacctgacttgcttgcttttctgttgctgtgacaaaacaccatgagcaaagcaacttaaagagaacagaacatttaatgggggtcgtagtttcagaggttggtagagttctgtggccatcctggcagggagcatggccatgggcaggcgggcaggggggcgggcaggcaggcatgatacttggagcaggaactgagagctcactttgagacaaccatgaggtcgagagagctatctggaagtggtgtgggcttttgaaacctcaaagctcgctcccagcaacacacctcctccaacaaagccacagctcccaatccttcccaaacagttccagaaagcggggacaaagcactcagatatgtttgaggcttggggcccatttttatttaaaccacactgccatcaaacaagaatttcttgttaagggagaatgactgagtccttcagtaatattaacatggtaggcagaggactacattagcttggtaagacgagatcctataggtctgtaaagagtttgagaaaggcaagttgaatctagtgtatgtggtagaaaaagcaaactgaccacagagtatactctttccccccagcttcttggttttgttttgagacttttagggaggacagagttctttccagtgttctttgaagctaggtgtgttccttgagatgtcattggggaggtcctccaatgagacttgtcagtgaagttcattactcaatgaagaagtgtgtggttctccttctgacagcctttttccttgtgtcccagaacatagatgaggtcttctgagttgcacacccatcctggcaccacgaccagtagtctcctagaggttttgctttgatgtcactgagccctgaaccaaggtcaacaagtgctgttctccttcccttaccctggacgtctcatgtgacaagccaaacccttagctgtttatgctgctggaaccgggtttccattgctacagctcagtgcagttcctctgtgtgtaaaattgtctactcactatgagccgttgcttatcacccctctcatcacagatcctcctctggaatcctaagccgtttctgtcatcattgctgtctttatacactggctgtgcactcatgtatcttggccctttggaaggccacgaacctttgtattgtctgtgacattcttccatcaccagacactttaattactttggagaatttacaaatggactgactcttgagaacagaacctttcgtgttggcctgctggtgccatgtcttgtcctccaccttcagctgtctgagtagctatgatgagaatacaactatcgccttacttattgggtgtgtgcgtgcatgcgcagagacagccatgtgtgggcatgtgtgtaccatagcacatgtatggaggtcagaggataaatgtgagagtaagttctttcctcctaccatgtaggtcctgaggactgagctccagttatcagacttggtagtaagcacctttacctgatctatttttctggttccagagatacacatttgaaaggaattacatttatatattagacagggtctcataaatcccaggctgcccgtgtagctgagaataactttgaactttataaaaagttgttttgtacatatcagtgttttgcctgcatgtatgtctctgtaccatgtatggtcattgcctgagaagaccaaaagaggatgttggatcccctggaactggagttgtagaagcttgtgagccaccaacgtgggtgctagatactaaacctgagttctctggaagaacatccagtgctcgtaactgctgccccgtcttcctagccccagccttgaacatttcctcctccccctcttatctctcgagtgtggagaccccaggtctgttccaccacatgcactttatggaggctgcacacaggcagctagacatgcactccaccagctgacctgcatctccagccgtgggaaggaagtagtttttagataaagaagttcttcaggtttatcatcataaagtaacaaacacagaggggttttgtcagaaatggcccagaaacaaaagacaagcctttgtgagcaaatacgcccttggggatactgtacacgaatccatcctttcctagagctggagagctgcaccatgccttgtcctgcgttgatgcacggtgagctgagctaagtagacagcctgctcggggaggacgtggggatagcgtcccaccaatgtctggtggtacacagaattgtttacccatctcccagtttttctcttgctttaagtagaatttgatactgcccagggtgaccgtgcaagcacagcttacagtctcctctttgtacccacatgtgtcacatggcttgcactgatgcagagagacttacgccaccaggtgtcacttcactgagcgcatgcatttcaagtcctttgttccttgccctgtcctttttcttacttaatatgggatataagacaatgctcagttcatactgaactacgggtaagagagtcacttgcaaagggtaggtcctaggagcatgggctgttagtaatattagtaagattatttgagtgctcattctcacctgcattcttttttttaagatttattttatttattatatgtaagcacactgtagctgtcttcagacatcaggagagggaatcaggtcttgttacagatggttgtgagccaccatgtggttgctgggatttgaactcaggacctccagaagagcagttagtgctcttaactgctgagccatcttgccagcccctcaactgtatttttatgtgagaaagccagttcttgtcttggttaagtcannnnnnnnnnnnnnnnnnnntgcaccagaagagggcatcagatctcattacagatggttgtgagccaccatgtggttgctgggatttgaacttcggaccttcggaagagcagtcgggtgctcttacccactgagccatctcaccagccccgccctgtcctttttcttacttggaatatgggatataagacaatgctcagatcatactgaactacgggtaagagagtcacttgcaaagggtaggtcctaggagcatgggctgttagtaatattagtaagattatttgagtgctcattctcacctgtattctttttttttaaggtttattttatttattatatgtaagcacactgtagctgtcttcagacatcaggagagggaatcaggtcttgttacagatggttgtgagccaccatgtggttgctgggatttgaactcaggacctccagaagagcagtcagtgctcttacccgctgagccatctcgccagcccctcagctgtattcttatgtgagaaaaccagttcttgtcttggttaagtcactgtggtcaggttttggctatatttttttttcagatgggtgtggagaacttatgtaattccctgctcttttctaatcatattaagctagatgttttgtatgcttttgaccaaattttaaaattacattgatataattttaaaattaagcaggtcagattacacatgcatctaaccctagctcttgggagactgaggcaagaaggtggtgagttagtggatagcctgggctacgtactgcgttccagaccagcctggactgcatagtgagattcagtctgaaataagcacaagattaggcttttaatggcatttgttttcattgccaagtaccaacaattgaatgtgtacagactttagcctttattgatcatgttttgttgaagttagggagttggaagtattaaatatgtttagataataaagaggtggttagtagagtgactggaccagctgtgtggaagagccaacagcgttggagtatatcacacattcagtgttttaatgtgtttatcctttttaaatgaactgaaagtgcacaggcagccagatgtcttgtgttatgtatgctcagctagaagcagctgctgaaacaatttcttatgatttaatgtccttggaaatccatcttacaagacggtttgtcttggttacagtttccatgtgaaagcaactactctgtgtttcttctaccccaactgctccgcagcattccagaccagcctgtaactgaaggtagaattagcatggagccggaagccctctcagctcctgtaatgagaacgtcagtctggctggaatgctttactgttgctcttgcttacctgtgttgaattagcaggagaatcattagaagtctaattttggtagtcatgtaatttcaaactaacctaaatctttctttcttatgagactatattaaatagtctattaaaattgagagcaaaatgattactaagaataacatacattatgtatgtatgtacccatatgtgtatgtgtgtctccgtcctcccacacagctcttgcttgacttaagctagcttgaacttgctgtgtggctaaggatgaccttaaacttctgcatctcttgcccccaacccagggtggtaggattacaggtgtatactgtaatgcctggttcctacaaacttttaaatgactctttattagaaacaggatcaggctaggcccaggtccagtcgctaatcccagttattcaagaggttctcgagtttaagacttacctaggggatccccactttgaggaagacaacagtatctgaacagggccctctcaagaccgactctgtccttgtggagtaaagggcatgttagatcgattactgcaagtctgggaggttaagactggaagcgctgtgttgtttgaaagacaggaatgttagaagactgagctcgggctgtgtttcagagtctggaccaggacacagctaggaagtctagggcttctccctcagttccactttggaggagttgaggaggtttgaaactgtctgaaccgtgacatcctttatatcaacgtgctttctgaaatataatagttataagtgcacattcattcagaccgtagtctttcagtagtgtgttgtgaaatatctgaatactgaagaggtttattctcccccagtcattctttgtgtttgagacagggtcttaacagtgtagccctggctggcctggaactgttgtgtagactaggctagtcctgaactcaagagaggctcacctgcttctgcctttcattgccgggcttgaaggcatgtgctaccatacttggcttgtacgtggtttccttagttgtcaatgagagcgaaggcccccagtgctcatggttgggggtggaagggcttttataactccaggataatgtctttcttcagccctccatgttgattcacagaggcttctccaaagccagctcagtggaaggcaagagctcgctacagcaaatcagctttaaattttcagtgctgcaaattaaagtctagcacagctttctggatgaattaggaagttaagacatcataagtaagcattgaactaaatgttgtagaattttcatacaccaagatagaattgtgtattaaaaggttacaataggcatttaaaaaaattttttttaaaagatttatttatgtattatatataagtacactgtagctgtcttcaggcaccccagaagagggcgtcagatctcatcatgggtgattgtgaggcaccgctgaacccaggaccttcagaagaacagtcagtgctcttaactgctgagccatctctccagctcgtggtcctgtgtgtgctgaggcttcttcactcagtggtagagtatatacttaataataagatgaccttgaatttaatccctggcacaaagtattacagctacacttctaatttcagttttaaaactagccatcactcctatgacagcatctgaaatatataataattctctccttttagaatatctctgttggctcaaatagctatttctaaattttcgtcttaatcgtttaaacttgtcagttgtttttattaaacttatgttccatgtacagtgctgccaggttcctgcccaggagtcagtcagaggagcatggcttttccttctgggttcattagctttgctgttagccaacaccaacactcatttcacgatggcttttgtccttgtccaagtgtccccctgtgccccagcatcgcagcacaaggtcacggcttctgtcatttattcacatgaagtgttaacttgctccagcagtagtctgttctaggacatttcagcccagatgctggaaagctcttaggatactgcggcagccaaagcagtgcttcagctcactaaagttgactttggtttagcaattgtgtaatgaaaataaattttccgaagattatacaaggacttcaaaacaagaaagatctgtcggctgaaaacactgttcatttttttaaaaaatcactccactgagcatggtagaattttggtttctctcaagtattggcctcttcggactcatttccctgatgacttggcgtttaagatagttcaattaatattttaaatttagttattatagaaattaacattacctcaagttctttttttttccttcttagcattatcaggagttaaagaaggaattgacatcagagctcacccactgcccgcccttaaaggaaaaccgagatgcatagattccgtgttgaagtgagcagagctaataaggagctgaggaagagagctagctttcctggttttgggtggagagttcttacaacatgctgtaacaggacacgggtgctgattgcgttcttcatatggcctcatttcctgtgtgctcggattctgataggctgaagctcagtgtggttggggtaacctggtcttgtataggtcgataccttgatgtgagcagagccttctccatgagagtgcatcggcaccaacctcccttgtctttccagccttcctctttgctttcataactgactcttggctttcagtttctttgtaccatggaaactttaatgtataggaacagttaggagcacagagtcacatttcacccaatttttgcaccagggttgaaaaattctacatattgttctgaatcttgctaagattttcagtctaaccgaggagtctctgtatcccagtgctattttcgttttcaaataaaaacaaataaatctaacacctactattcatcctatttttaaaggacacaactcagtggttttgtgtgtattccccatgattctgcagcaacagagaaaccacaagcattgtctgtcacatccccacttgtcccctctttctcctcatggcaaacagtcccctctttctcctcctgtgggttttgcctgtgctgggtccctctggactgacttttcccttctaattctgtatggtctgctcaccttcatgtattgtcatgtgtgttgggactttattttctccgatggaggttggggagagtgaaaagtattctattgcatctatatgccacattttgaacgtgtattcatcagttaatagactttgtattttgttatcttttgccattatgtgtaatgctatgaaaatttacgtgtaagaattttgtgttggtatatgttttcagttctgttaggtatatctacctaggagtggaattgctagagcacatgggactctgggcatgccatttcgcattccagagtctgtggatgaaggttacaatttttctacctcctttcttattcagaaaattccatgactatatttatttattagaaacactaggcttcttttcttttctttttttttttttttttttttttttttgtttttttcgagacagggtttctctgtgtagccctggctgccctggaactcactttgtagaccaggctggcctttgcctcccgagtgctgggattaaaggcgtgcgccaccacgcccggctaactaggcatttctgatgtgaatttatagtatattttttcttgatttgcctattgtctttttgttattatttaattgtactaagaacataactttgtttcggtaatgttgattttttttttcctcttgactgtcctggaacccactctgtagatcaggttgttcttgaactcacagagctctgcccacctctgcctttgatcttatgcttattttataaaatgggtctgagtattagagttggtgttaggtggccaactagtgggtgcctccttgggaagagtgagttctaccctcttctttcccagtccttattgcctgcagttctctggctgaggcccctggggttgtacccttccttgttagcatgtttgtccatgtgagttttcagatcttgtttaggcagtcatgttgttgaggcgtcatatctaggagagacatcccacagcagatttccttgtcctctggctccatcttcctgccacctcttctgtgatgtgttctgagcccgagctgcaggaatggtgttgtatctattgtgatgggtttccaccatgagtggttctctgtattttgggcagatgcggctttctgttgtggtgtcagtctgctgcagagagaagcttctttggtgaggggtgagagctaggattatctgtgggcatcagggtaaattttagagcacagttaggctatgctggtttagtaaagtgctggtgataggttctcgctgagatccgtgaccgcgctcgcttgctcgctcgctcgctcgctcgtcctgggcagttgccttgcttccaggcatcgtttccctcctgtcgagtgagccttaaatccaggttgttcccactggatatgagctgtactcacacacctctagggatctcctgctgtgctggtcgttgtcgtggctcgaatgcatcacagctaagtaggatattagcggtcccttaagaacatggtgttttgaacctccaggaccagtggtgtgcagcttttgatcatttccaatgaagtgacagaatattaactaagaacattcccggctgaaatgagattagacgcactgcttaagccgtctctcatgttttattgatgttttgtcatggtgttaaaatgatttatttttttataaaactttacaaaatgtttattttcaaattctatgtatgtgcacatgattgcgggcacccaaagggatcgaaggtgtaagattccctggagctggacttgcaggagttgtgaaccacccagcaagggtgctggaaaccaagcagtgtgtgctcttacctgtggagtcatctcttaagccattggtatgctttttcaaggatggtctcatgtagccaaagctggccttcaatttctgattctcccaaattttgaaactgcaggcccgagccaccatactggcttttcagacactgtaggttatgaagcaagtgcctgtgccactcccagttgaagtctactcctcagtgtggaggtcctagggctcgaggcttttgggaggccatctctcaggaacgacaggagccatagctatctctcctcaccactgtccaccttacacggctgcagcaagaaggcagctacagcctcaagaaagctcttgacctggaactaaattggttggcatcttgacctcagagtgctcagcccctgtagttgtaacaaaggaatgtttgtttatggtaacttgttggagaattcatactctcaatgacaaagtcattacacagaaatcatataatagcagctatcaaatgataaataaaaattaaaatgccattaaaaataaaacaaaacacattggattaaacttaacaaatatgtgcacttaagtattaataactaaaaaacgtgactagtgaaattaaggaaggcctaaatgtgactgtatatgtatgaattaaaggcgatagaaatgaggtggcaggtcagtcagtctatagattcagttagtcacatttgtatcaggattgttagtcatctttttaaaaggcaggatcttggtatggagtataggtggctttgaactcactgtgtagcccaggcttagacggaattcacacttctccctccctcctctctcccagcgggtttgcaggcctgtgccgccatgccggactttatattgtatcaggaattggggcctctaggaagttgtcttacatagttgttgtcacacttattttctcttcacagagaaagagagagatagagagggagaggaagagggagagagacagagagggggagagggagaaggagagggagaggacactgtgatcctaaactggaaatggaaagttgaatattaattccctcttcactgtctggaagtctctcagctggggctggggcagggtctttgtttgctttgttttttccttcagtcctgaagacagtggaaagtggaaatacagtatttttctctaccctcaattgatagttgttggaactcatagagtattctgttgaggtggagtgtcgtctttcaccgttagcaggcagtgtgagtggcccactaggtaattcccctaagtagttttcattatctgttttgacacagctgaaggacctgtgagtgtaagttgggcttaatactagtaactcttgctgtcttgtgcagactactatcctgttttatcttctaactacccaggaaagtaactgggaaagaaaaggaaatcttaactagctcactttcatcatgtccagctagcctgcagcttttaagacattgtagcataagcgatctgtgattcgccgtaaagagccaatatgtggtcagcttggttttgagtggtggcaaagttatagctttgaggccatcggtgagcttttgttcactaatgaccctggagggtcctcccagctgtgggaggtgtgggggacatggtaactaggaaacatcattgacagacagctgcattttggctgtgtgtttcgtcaagtcctgtgtctttaacggattttccgaatgacatttgcatcatttccccgggtggtacaattgaattgaggcctacttattttgaaacagttttaaaaactactgaacgccatcattttcagggattaaatgagagcatgggctgctttgcttcggccttgctttgtggaataattatttttgctgttgctactggttctgctactgtctcctcgggagtctagtgaatttttatacagagtgctggtttatgaaatagtatttggaagctgaaagttggagtttttgttttgttttttttttcttttgtccacttttggtaacacatactaatttttctctgtaactgagcaaactagggcaaatccatgattgcttcctgtcatctcattttgtatgtagggcacaatggtaacgggacataggctgcagggcggggctgaagataagagtggttaatgtgatgaccaggatgtaagcggcagtgcagaatgagtgatgtggggggtgcgagctcagcgcgtgagcttgtttcttatatgccctgttctatttaaatggaaacctccgttaactcagaggtgctctgctgttctccatctgatgggagagccttgtatgcaggcaacagcagatgcaaaacccggaggtgggctcattaaggtttctgagtaggcctgtcaaactggaggtgaaggggcaagggcagggatgcagtgggaaagaagttaggatgctctgttagaagtcctggagtctctcttccaggagggtgggctcgggactgtcttctaagtgaggtgcatggccactggtagtcataatccctgtgtaagtattttccagcggggaggggagggggcaagcctataattcctgcagagtgagggggtgggggaggagggctgaggcaggattatgagttggaggctattttgagttacatagagaattcaagggctatagatttcactgttggcattaaatttttcttttgctctgtaccaatacatgtgtttggaaataagtcttttttttttttttttaacttttcttgcttgcttgcttcttctaaagaagagtgccctgctatagcctgaactttctgtgaagaccaagctggcatcaaatttggagtggtatttttgccttcccctcatgtgtgctgagctacctacaggttcttctgccctgcccagatggggtatgggcaggcaagcttttcagatgctggactccagcaccccctccccccttgttcctttccttcccctgtgtgacaactgcaggtggcagtagcaggctgagggaagcagtggcaagtggagccctctagtgttacaaccccaagccagtcttgtgtatagagacccttagccttacaagtgctggtatcagggccttggcttctggcagaaaccagtattaaagctgtcatgccctgtgccctgatgattgatagctttctgggactcctgtgcgagtagggccctcaggttctnnnnnnnnnnnnnnnnnnnnnnnnnnnnnnnnnnnnnnnnnnnnnnnnnnnnnnnnnnnnnnnnnnnnnnnnnnnnnnnnnnnnnnnnnnnnnnnnnnnnnnnnnnnnnnnnnnnnnnnnnnnnnnnnnnnnnnnnnnnnnnnnnnnnnnnnnnnnnnnnnnnnnnnnnnnnnnnnnnnnnnnnnnnnnnnnnnnnnnnnnnnnnnnnnnnnnnnnnnnnnnnnnnnnnnnnnnnnnnnnnnnnnnnnnnnnnnnnnnnnnnnnnnnnnnnnnnnnnnnnnnnnnnnnnnnnnnnnnnnnnnnnnnnnnnnnncctcacatcggggacttcaggtagatcaggcctgaggtcaccctgtgtcttaagctttaggcagttgctgcagcctctgcagcttctttagtagctggcaggaacctatgctttgtgtgctgggaagccaggactagggacctgggtgtgggtgatgagtgggttatgtgagagagcactgctggcttatgggtaacaaggtgccagctgttagggtactcctgaggctactcaacctcttccactgtgaagcggctggtggatgctttgtccctggaaccccggagttagtagggactgccttgggcaatattggttcccagtgccaggcctgttgggcttccactcacctgtgtggtgtttagctgtcaagtctagtgccaggcttcaggctagttttccagtgaaaggttgctgctactgtctgcagtgatgcccctgtcctgtgtcattcctgcggctactagggtagactgttgtacagaagtgggcgaggaaggacgactccagaggatgtgtggtcctgatgtaacagcaggggagatagcatgaggaagtggctctgagcctgttctttaactgttcctctgcagcttgcagtgcagccccacaggcctccaagcctccctccggcagggaagtgctcctcctctgctgggagaaatggttgtctggctgggcattgcacatctactacagactgagatagccccgacgggcagggcacccagcagccagtgcactcggctgcagtcgtggacagagctgtctcaaggcatctgtggcatggtgaaggcagctggtgccggtactggggtagtctttctaactgttagggcagcatccttttctcatggccgctccagcagcaggagaaggcccagtagctgtcaatggggagccaggtttccctgtgcaaacagtgtccttgcttaagtgcaggagtgaacgtcagaaggatgtttctgtttgtatttgattttcctctcaccccattccttctgtaacagcgtttaaacttaccagtgctgtgagaagaacatctaatctgtggctttagaagttgctcaatgtatccatgcacctgctgcgtttattaaaccagttctccgcagttcacatccaaactaggcagactacagcttagctcccagcggatgaccctgtctgtgtaccatgtctctgttctgtgtaagactgctcctacttgggcagtgtgtgcgcctgtagtctcagtacttgaggggttgaggcaggaggattactgtgaatttgagaacggcctgggatacagagtgagtttgcggttgacctaggttacataatgaaccctagtcttaaagaaagaaagcccaacaaaaatttttttgaatgacccaaatgtcagctgtttaacaatcaatattacctgataatttttatcttgtcagatgtctgagtagcttgatgtgttacttctgagattgtggtcaggtcagggctgggatatctgaagcttcaggtggggaagggcttgctgtctaaatccctccttcagggtgccgacagggtgtccttcccccagcgttgttggactggggccttacttccttgctcactgttgatggaggcctcacttagctctttgtctttgggctcacaagaccaactagtaaatatgcgttccagacagacttgggtagtttaattaatgattattgtaagtagaatcctatctggtcacctgtgtcatcattagtgagttgtaagtgtccagtttattcttcattaagttcaaggaatgaggaatagcttggcagtgatggagcacacctgtaatcccagcattcgggtaggcagagtcaggcagacctctgagttcaaggccagcctggtcttcagagtgagttttccaggacagccagggctacacagagaaacccttgagaaggaagaaaggagggagggagggagggagagagagagggagggagggggagagaaataaacaatataatttatagcagtaattaagtaatcactgagctatccccactctgtgtgtgagtgtgtgtgtgtgtgagtgtgtgtgtgtgagagtgtgtgtgtgtgtgtgagagtgtgtgtgagtgtgagagtgtgtgtgagtgtatgtgtgagtgagtgtgtatgtgagagagtgagtgtatgtgtgtgtgtgtgagagtgagtatgtgtgtgtgtgagagtgagtgtgtgtgtgtgagagtgagtgagtgtgtgtgagtatgagtgtgtgtgagtgtatgtgtgagtgtgtgtgagagagtgagtgtatgtgtgtgtgtgtgagagtgagtatgtgtgtgtgagagagtgagtgtgtgtgtgtgagtgtgtgtgagtgtgtgagtgtgtgtgtgtgtgtgtgtgtgtgtgtgtgtgtgtggtgttgtgtggtactagggattggacctgcagcttcttgcatgctgggcagatgttccatcactgacctgtgtcactggcacgtccccttcccctaacttttaagacagagttttgctgagttggccaggcagagtttctgcccctcagtatgttatgtttctaaaatgcacttctaccagtgattgctccttaacacatctggttcagtttaaacttgcctggttgagagccagttatctttaaatatacaacaaactaccatttagtaggtgttgcctacttttctttgaactttacttgaaaatttcctttgacttgaaatttcctttgggctttaattgaaaactttaccatgaaaaatttcagattgataaaaatgatttgggtgaataaatatgtaccaagctgtcacaagctctcctctgttgatggacagctaggttgattccattttcctgttaaagtgagaagagcccatctgactgtggcgggatctagactccttgggatatgcccacgagcggggactgggtcataatagttgtctctcgattgccgagaagctgccactcgagtcccacagcggcttcatagttgacaccgcagcagagtttgctgtctttagttttcctgatgttggccattgtgagtggggtaagagggaatctcaaaatagatttaattcacgtgtgtttgccggctggttagaaataatcaacacttaaaaaattttatcaggttttatatttcttctgagaactgtgcgttcagaggattgattgacctatttgtttcctgccaatttcttgtgtgtatgtgtttacttttgcagttctttaaaaattatttttaacttgccaaaaattgtgaatatttgtggagatgtagggttgtgtctaagggtgcagtgccgtaggccagcaaagaacattgggtcccatggggctgggactacaggcagttggaagccactcactggaggtttggagaaatgaactcagggtccctgtaacagcaatgaataatataccatcttttttgtttgtgtgtgcctgtgcctatatggctgtatgtgtatctgtgtgtgtgtatgtgtgtctgtatgtatgtctctgtgtgagtgtatgtctgtgtctctgtgtgtgtgtctctgtgtgtgtacgtgcctgttgcatgcataaatgtgcacatgtgtgtgggatgcacaaccgtgaagtgagaggacattgatgttttttcatcaccctttgccttattcctttgagactgggattctcaccaagctcagggcttagtaatttggggagctggcttgccagagctgctgacatcctcctgttcccaccccacagcccgtgcgtcacatggtcactgttgatgtcctgccaatcatgcacagttggcctgagatgttgcacattagagatgaaatgcatacaccattctgatttagagatcgtggccttccctctgcctttcctgctgcatatcggttgctgttgttagtgagcagagacaagcacaggggttagagcggatctcgagagcagaaagctgctgctcttcctaccgtacagcagtagactaatagacacgggaactgcagagtaggagagcagtgggatgccaagtccaaacagaagagctaatgaccagaaagggggttaatattttggcttgacttaatttttatcttaagcattttttttaaattacctgaaatatttgaatatgtagatttgactgcttaaatgtatggtttatgtggaaagagcagtgtttaatcttccagaccggtcatgactctgcttcccccatgtcttcagggatatcacgtatgagatagcagtggaggccatctcggcaatggttgtcttcctttcctgccaactcttccacaaggaggttctgcgacagagcatcagtcacaagtacctgatgcaaggcccatggtatgttctgttttaacgttgtccttcataaggagcaaccactgtgattttaattgttatttcttttcatgggtgttgtcattttaccaacctgccctcccttcctgttctgttggtacttcatccccaacacaaggtgaagccacagccgggttcctgtccctctgtgctctgcctcgtcccccagttcatgggtacctgtcatagttgctttatgcagcaggctgctgtcatctcttccttcttcctcctcccctgtcaagtcctctctgtatattccagctgcacccaagtcttcctctttctccagctccttggaatctagttgtcctttggtatctgcagggaactggctaggataccaaaatccgcaagtccctaaaacatcctgtatgtaacccaggcacatcctcctctacgctttaaatcctgtctggatgacagatagttcctaacacaatgtgaatgctttgtaaataactgatatactgaatcgtttggaaaataatgaggagtaaagttaagtataaataagatttttttttctgagtatttaaaatttgtgattggttgaagtagtagatgcagaatctgagactgtgttctttgtgaatttgaagggctgacttctgtggtctgtgaccttttgttgagcctgccagtggccccttcactggtctgatttaatgagcatctacttatttactgtatgctacctacatgttggccttcctccgtagcagacacttatgggaacgtggctaaaaacactttcagtaaacacagcaccctaccttctcttgacataattttcaaaaagctttaaatcaagcaagtctttagaataagttagtttttgttaaagttatctgtaagttctagggatgcagctgtgggtagaatacttgtcaattgttatgagtgaaggatattgtccatagcactgtcctcgccttgttaccatggttacactacagcatgcatgttcacaggctcccgtagagccctttgggtaagtcacacaaaaaagatgcccaatgcccagggttaagactgcatctggtgaccttcttactggagactcccaaggtgtcactgggccttgtgcagcaagagccaagccagtgtgtggctctgtcttactgaaaagctactgggattgatcatgtgagctccagacttaccttctgacgtaactgacacgctccactgccaaacaccatagtgagttttcatctccaccatcttcctgcctcgcaatgaggattgaactctggtgtgaattgtaaaggagacagaccataatactggagcctgtgcaggtgacatttgaaagtcactgacaagaaggggaggcctgggctttggagacttctctctaaaccctaacagtggtggagtaacctggcctgcaggttatggttggcatgctagagttttgactagaactgtatttgttatggtgctagaaatataaaggttgtattttccataggtggggaggacgttagtagtcttactttgttagtctttggtttttgtagtgtcattataatgacaaatacttaagcagaatatttattgtcataaaagccatggtcatcaataatacatgcaaaaatctacaagtggaccagagaatatagaaattaccttgtcaccaaaaattgaataagcggagttttgcgcttacaacatgtgtctcattgctatttggttggcacattcctctgctgatttctatgtagcaacctgccttcagtagccagctgtgctgcactggccgttacatttataattacttacaattctatgtaagtgacaagcacatgcttatgcttaatggttggaatcgtgctgtctggtgtggagacagcgccagggtcaaggtttgggtcaggttgtgagatgctcacacgttccctgaggtagtcctagggacaaacatattctgtggtgttgtgcagaattaggtgactctgtgaacaggagtttgattttaatttttttttttttttttaccctttctatgtagtcttccctacaccagtaaacttgtgaaaaccttattgtataactttatcagacaagaaaagccacctccgcccggaacccatgtcttccctcagcagtcggatgggggaggactgctgtatggactggcatcaggagtagcaagtaagtccttccgtccttcacgtcctctgtctgtggaacctcttctgattggccacacgcagttctcctcacttggttgctgccaggagccattctattgagtctgggtagctggctaagtgtaaaagtgcaaaggcgttaaaatggcaaccctcccattctctgtagtgattcatgttaaatgtatgcaaataatgagtagattatttagctgtagaacataattgttcaagacgaatgtttatacgtaattatggatatcatgcaaggtctggctctgaagagaaagtaacatcaagccgtcggatgcttttcactcggtgcctgtaggcaacatctttctgttcagagactccattggctggggtttcactgcacaatctcagagctttgttcagtgacaaattggtagacttggaagactttgcagctaactctgcagcagcgtgggatggggttgctgaagaaaagccctttcctccctcacagtaggcgtcgtttctgccgcagagttcagagctagaggcagggctagcacgaggtgccttgggcttccttctgagaatagaccaggctctgagagctaacacagctgagaccgtgggctctgttataaaggaggagtagtaactcgacatccgggtagtctcctgcctgcagccgagcaagcagtaccttggatgggggtgggcagcacagggtggcagcttgctctaccctggggcttgccagcctctcactaagaagtctcaggcttgctctgtgagtcaagcaactgatgagtaagctgccagacttggtagttggcctgcccttggttcccatgggatcctgtgttaaatccatgtgttgtcgatcactcctcatctctctagggagccagcctaggatgccacagtgcgccgcttctgtactgtgccccacacagcaccgcttaggtgaggcctccttctgaaggccacatggcagtggttttctagtctctccgggacacagaactgatctcttggtctgtccgtccgtctgtccgtcnnnnnnnnnnnnnnnnnnnnnnnnnnnnnnnnnnnnnnnnnnnnnnnnnnnnnnnnnnnnnnnnnnnnnnnnnnnnnnnnnnnnnnnnnnnnnnnnnnnnnnnnnnnnnnnnnnnnnnnnnnnnnnnnnnnnnnnnnnnnnnccctcccttccttcctctcttcctctctctctttctcacctttctggtgtgagtacttggcatctgagtttttcccaatattctaatgtagctagagacaagttcattagttactttcttcaaaacagtggtcatacttggtagatttttgttgttgttgtcttaaacaaataaatttggtgccattagttttctgagtgcagaatccaggccttttacaatgtagatagagcccacacagcaggtactcctccactctgctgtctcccagctcaggcttacagacggtgtggttggacctttcctgggtgtaaacagcactggctttgtaccattgtatgcattgtgtgcttttaaaaattacttccttcaaaacagagtacattgtcttaaaaactcagtttgggatagtgatggtggggttggtcttgtgctctgtgtgttcagaggccgagttctggaccccgagtgagatcaggctgcagtctgggcatgggcattgtatcagccagtgtgctgtgaagaaggctccgcagtaatccgattggacagtaaaagactggagcctgagactggccaggagagagacctgagatggagtagggggtccacgtagatgcgaggaagaggtccccatgaggcaggatgggccatgtgcatgtggccaagagaagatcgccctgaggacacacatggagcagagcaaatagagcaagagtcggctggcaggtaactcagggcctgtggctgggatgtaggttagatagctcagaacctgccctgtttaggattacagctcattaatgaaaatactgggtttctgtgtcatttattctggaatggggcagactcctccctcccccataaaattacttttacatagtgcttttgttaacactggcagggcaagggcctcggcctgagctctgtgtgactctgcagcctttctggttttcttgttgttatccttcccttcctaacttacattaatggcatgagtgggaaggctgcttgatttaccaactttctggactggctatcccaggctgacctctaacccataatcctcctgccgcagctttctgagtgctgagacaacaggcaggcacagccacacctagctctagcataactaaatacttgataaaattaaatactaaaggctaacatgtacctgggaatggtggccatcttgtctttaattccagaattcaagaggctgaggcaggaggattaccagtaatttgagcccagcttgggctacaaatgtgaggtcttgtctcaaggacacaaagagcagcagccatgagagccaacaaccggtttgtgtctgtgctgagatgtgggctttgtcatcacagcagtttccgtcactgtctgactcctgcctgttttctctgctttccctgtgtgatcccatccacttgagttttctttgctcgtgttttactctgtgcagtttcaaggctgttcagcggtagagtggtgggatggatttccatccatcgagagtctccagggatgatcaacatttgctggtttacattgtatctctctcctcactggtaaaagaaatgttttaccaggaaatcagtttacgcattcagaaaacttccaagagcacagcagtacaaacccacttctccctgttccccactcttgttttccattttatttgctgtcattcgccgtcatcgtcactgcacttcctctttaaggcacttgtgggtaggttacctgcagcgcagccttcctccctcaggggcatctcttggacccacagtgtagctgtggtgactgaggaggggatcattgccaacgagtcactcgtgaagaaaggaaagaagtccctttacgaagtgtggtttcatttaagtgttgcacttaggttttgttttgtgttgataatgatcttatgctagctagcccagtgtgccggcactcaggcactcagtgtgcagtccaccctgagctcacatcgttccccagcctctcaagtgttggtgactggtgtgagccaccgccctgatccacagttaggttttcttgtaactgttttgccctcggtctctcttctgactccgttcctgcttgtcttcttcctacaacagccagccgctctcccattcctcaggagccgctctcccattcctcaggagccgctctcccattcctcaggagccgctctcccattcctcaggagccgctctcccattcctcaggagccgctctcccattcctcaggagccgctctcccattcctcaggagccgctctcccattcctcaggagccgctctcccattcctcaggagccgctctcccattcctcaggagccgctctcccattcctcaggagccagggccgtgttggctcagaggaggaaaaaacaccatgggaattgctcatacagcaaagatacaagtagaatttttgtttgtttctgttagagtaatgacaattcacatatagttttttttttaagctttttcagattcattgagtgcgatttcaaaaactggttggaatgaattgtaaattaatataatactttattataatacatgcagataaacatatagtcatagttttagagtataagaaattatttatagcactatgccgccagtataagacaaagactcagttgatgtatcactgttttggaatgagtgctttcattttttaaagttaatgtattattttaaatttgcagctgatttatcatttacgctaatcacagaattctagaatcacctgatatactttaaaaaatctattcatctgtctgcctgtcagcactattagatcttggcattcctaatccatagatagagtgaggtctggtgctaacatagagttatttttaattgtgtgtctgggagcacacacatgcactcctgcggctgggagcacacacatgcactcctgcggctggaagcacacacatgcactcctgcggctggaagcacacacatgcactcatgcggctgggagcacacacatgcactcatggcgctgagagcacacacatgcactcctgcagctgggagcacacacatgcactcctgcggctgggagcacacacatgcactcctacggctgggagcacacacatgcactcatgcggctgggagcacacacatgcactcatggcgctgggagcacacacatgcactcctgcggctggaagcacacacatgcactcatgcggctgggagcacacacatgcactcatggcgctgggagcacacacatgcactcctgcggctgggagcacacacatgcactcatgcggctgggagcacacacatgcactcatgcggctgggagcacacacatgcactcatggcgctgggagcacacacatgcactcctgcggctgggagcacacacatgcactcctgcggctgggagcacacacaggcactcatgcgctggatcacgctcgtgcacctgtggaggtgtgtgcgtgtgtctgtctgcctgtgtgctgtgtatgcatgcaggagcaagaggtgtggaggtgtgtgcgtgtgtctgtctgcctgtgtgctgtgtgtgcatgcaggagcaggaggaagtgttggctatcctggagctcgagctaatatgtgttgtgagcctgcagatgtgggtgctgggaaccaactctagttctctagaagagcagcaggcgctgctgactgctgagccgtttctgcgtcctcagtccctggctgctaaatcgcactgactgatttctaacacgcataaatgggagaccgtttgtcctgggtttgtgaggagtggaagagataagtgtataaaatcccacctaagaccatgacatctgtcctcgtgcagatgacctttgctgtcagtcctcacgctctgctggtgtttggtggtgaaaacagtagaatggtgtaaaacagaatgtgaatggaattttaattagaaacaaccagtgatgagagaaccctagggacatttatgttaagacagtgttaaaactcagggcatctatgtttctggtctgcttaaactttaaatcatgtaaaaagaaaagttttaaaagaccgattaatgaatatgcctgccacattcttgctttgtgtccagctggctctttgttttatgtggtgcaaaattttgtcagtgacagaaaggaaaatttgattattaaatagatatttccacaagaaatttgttccttcctaagtgaacttaccttgacaacagttgccatggtaccatttcgactcctctgaggacttttatgtttgtttcttttgagtatgtgtgtggaggccagagggccttgggtgtcctcctcaggagcagcttaggctaggctggctggctcatgtgtcccagggactacaggggcgaaccggtgccagccttgtatgtgggcattgtgtgtggaactcagggtcttgtgctcacaaggaaagcactttgctggctgaactgtcctcccagtgctgttgactataaaattagcccaaatgtttaatagagaaaatttgatgctgactcaattcaaattataataaatattcaaacattcatttaacccacgatatcattggtcttggtaaggcaattgatagctcttaatctctaagcacatcaccctatgctgttaaacatgtattataagcctgtgaccctcatgtccacaacttgttatgtttttaaagtgtgtcctggcctgaggtcgccttggcagccttaacaactgctgtttgtttctcatgggtttagaacctacaagtataacgtcaagatgccagcaagcttgcttcttgatgtgggtcctcttcctggcttgctgttctctcatgggaaccagaaggctttgtgtgacttcttacaaagtcactgtcgtacatgggggatctgctgtgctggcctcttagaaacatactactaccaaagatccattttctgattctgttccttaagagaactttaacatctgcttttgggggtaaccgaaaatccctccatagccaggcgtatcagtcatttctgtgtcactgcagtgagagccgggcagctgctttacaggacagagagggttattctggttcacagttgtggagattctcaagtccaagacttggtgtgctggactagccttgctggtgcagtcctgggccattacctgggaaggggcagggagtgcccccgcctgtctctttttagcccctttttcatgaagacactggtgcttagtcttgagggctccaacgttatggccccatctagttcattttttctacagccatgagcaccatagctggattaagtttccatccatcttctttctatcattaacataacttggttttaatctcccttgtgactcagaggacagccatattcaaaccctagctacatatcaagttgactgagctggattgcatggtggtggcttatggctttaatcctagcaaattgtatgatctatcttgtgcgatgctagctggggccgtgcttccagtcaatcattgttttaaaccacagcgctgcttagtgggatggtgagagttgtggaccaagtagatcaatctcaatcctaaacaccaattacaaatccaaaatggatatttttattttctggctttggatatttacattgtcagtatttcgttttggaggacaggttctagaatacgacaatttgccactcattgttaacagttgcaagcactgaactctggatgtacactgggtgagcaagatgaaatccaccctttgttagttagcatgggtgtttgagctctcatgtcctggtacaatgaggatggcacacgtgtgtcttcttatccacactctcacttacctgaggctaactgaaaaggccactgcaaaatcccagaaataagcagttggaaattcagtttatattgaatgcagtatgggcagtgcagtcaaagcttgcactgttgttctccggcctgctcaggatgtgactcctcccttcccacagtgtgtctgctgggtctggtagcacccatttgtcactgtctttagctattcttccttcttccacccttcttcaccctttttcttgcaccctttcagccccctaacactggatatgagagaaaaaagggtagaaaggaaaggaaagagatcctgaatcgggtcggaaagggggtggtgttatctgcagactgcttcctgccgaataggggcgtgagttccttggggcaagtttgatcatcaccatcaggatatctaatttcttcttgtttctttgtgatcaacaataaccatcaacctaccacttgtctcgggggccctacatttatataaatccctttataaagtccctagaattccaaatgtcacacaatcacagaatctgtctgctagaacacgatgcaaatcatagtcagctgctgtggacagtctgaagccaccccatatcccacacctgggattaaaatgaaaacatattcttacaatatttctgtgttttctaaaagaccccaaattccaaattctcactacacctgtagtagccattttagaagcagatggactatcataatcctagattcagagaactctacttaatgatgttccttagttgtgatggacaattgcaatttgggtatgctaagcagaaaccatatttgctttcctcacataaaaacttttgacttaataaggaaagaaaaatggttgctaagagctatgatgaaatgagtgtggatttatgaagagaaaggaagagctgcagagatggttcagctgctaagtgcttgctgtcatgtgaggcatgagggtgtgagtccatgctcccagcatccctgggcaacctggcacgactgtgacatgcatgcctgtaactccagcactgtgtgtgtgtgtgtgtgtgtgtgtgtgtgtgtgtgtgtgtgtaaaatcttagtaatgcaagtttcgtaggatctctttcttcaagcattcttctaggggcattagaatacacccctacccatgatgggaataatgtaccttcctctgtggacagctgagaccaggtgagtaaatgcatgaaagaggcagtcaccacatagctttacaatgaatggccactaattataacatataacccctagtaatatggaaactatagtatttaaaaatcctttgctggctgtggtagcataatgtcagcatttgagcgtcagaggcaggtgtacctctgtgagtgcaagccagcctgtagcctgttctaggatacccaagccagctgtagcctgttctaggacacccaagccagctgtagcctgttctaggatacccaaagctgcatagtgagaccatgtccaaaacaaaacaaaaacaaacaaaaacccccagacaagaaactatataatgtacaaacaagcaaaaacaataaaaatatgttaaaaattgggcctggagagctggctcggcagttaagagcacactggctgctctcccagaggacccagggttgattcccagcacccacctgacacatggcatgaaagtccaggtccagtgatctaatgccctcttcttaggtactgcatacatgttgtgcacagacatgcagacaagacatgtacccatatatatatatataaatagaacaaagtatgaccttacaatgatttacaagtttgctttggttttttctatgtgaataacttaagaaataccagatgcttgacatgtgtatttgttattctatactatatgtgaagtatagtatatacaatcatgctttgcttaattgcaggccatgtgataagaaatatgtcatattttaacatacaaacatcaaattatacttatacaaacatatattgtaggcttagatttttcacaacctactttaataagggttcttaaatgtttaatctcccttctagtccaccatccaacaaaggtagtgggaaagaaaggttgttagggcagagggggatgtggacatgtttagaaatagttctttgaggcgattccaaccttcattgtcagcattccagttctctagcagaacaccaatacgaatcagcagtgcagtcaagtccacttggcaatcaccactcactaatcagcaaaggcaatttaatccagaagagaccgtgaggctctgctaattaccctgagtcactagaagcggcaagaaggctctggcttatcacgagatgttctttggtgagtttctctctacaaagtcatgacaagtgaagatgagcagggtgatgcaaagcaaactagaacttgagcatagtcatcgaagaccagtggggaaaactggttcatcaagagacacagcagcatcacatacagaggcattctctttataataagctttaagtggagggagtataatggtaaaacagtgatacagtgtatgtttagcaaatgtgtaaaccagtagtatagctggcgatagcatgctccaagcatgatagtggctgtgtgtgacggttacagcagatgcttatgaaagcatcgccacaaacataaacatggtgtgctcaggtccgatggctgcgacgtaactaggtgctgggaattttcatctttgacattacgggaccaccattgtacatctggtctgtcattatgcagagactcagggttgccactgaaggaagtccactggagaagaaatgaatagtgaacatctagttacttctgtgtctgaaacattgttcatcgggatgcgtggctttgcagtttgtgtgcttcgttatgataaagccgcactgtcattatagttgggtgtctaagccggcttatgtgtactctaccacactgcttccagtccagtctcaggttttatacagtggcttctgaggaacgctttcccacttgactgaaccatcaaagctgtttcatttcacttgcttgtagtggccagtgtccacagcagattataaggccaagtttaggaaaatgtagtaacagagaagttaataaagtcaaacccaacgttcccacctctgcttcccacagccgggtatggtgacacactcgtttgatgccagcacttgggaagcagaggcaggcagatctttgtgagtttaaggccagcctggtctacagattgagtttcagaacagctggggctacacagagaaaccctgtctcgaaaaacagagaaaagaggtgataacacaaacaacttttttttttttaagatttatttattgttatatgtaggtacactgtagctgtcttcagacacaccagaagagggcatcggatatcattgcagatggttgtgagccaccatgtggttgctgggatttgaactcagggcctttcgaagagcagtcagtgctcttacccgctgagccatctcaccagccccataaacaacttttattcccccgactgctgttctgagagaattactgagtgaaccatgcagactgtggcgctcagtagttggagcttatcttatgtgacggttcttttcccccagtgttggctcctgctcagtgggctcattgagagaaagtgtgcctcactgagaaacacgcatcaccgcaaaactgacagactttcaatgatacatctcgcacgtcacaagagagggctgggtaatgatagtggtgcgctttaatttttatttggaatgctctggtatactttattcaacaagccaaagaataaccctttgtttttgtttattttgtttttttttttcataattaaattcatctatttataaagtgaagttaatttcaggttactgtttgcaatagttcaggaataagtaggggccttattaaagtaagcttgtaattctagtagtctagatgtcttggaaggcattattaaatgatttttttaatgtgtaattgggaatcaccatccagaatctaccttagttttgtaccttccttgagagggttacagcatgtccctgagggggttccagggcttgccataattaatgttcagctaaaatacaaggtgctttttgctttattagcacaagttaaaatctgtacattgttaataaggagcatactaatttttaaattgaaatgaggtagggtttatgtttcatgatctggcagagcaggctttcaattcttacaaatgtaacagtttccactggtgtacttcattccacacagtgctgggttctataaagacgctctgtacacgtttaagatggtaatttgagcgaatccacgtaccttttttccctttatcaccctttttcttccactaacctcctctgatccccaggacactttggtctctacttttatgccatgtatatgattttatgcatctgtatgaaatcttggcgccacaggagagacagtctgacatttgagacaagtttatgcactctgattatgtccggctccatcattatccactttctcctctccccacttctcctcaccaccactgtactggctggttttgtgtcaacttgacacaggctggagttatcacagagaaaggagcttccgttgaggaaatgcctccctgagatccagctgtaaggcattttctcaattagtgatcaagggggaaaggccccttgtgggtgatgccatccctaggctggtagtcttggttctataagagagcaggctgagcaagccaggggaagcaagccagtaagtaacatccctccattgcctcgacatcagctcctgcttcctgacctgcttgagttccagtcctgacttccttggtgatgaacagcaatgtggaagtgtaagctgaataaaccctttccttcccaacttgctttttggttgtgatgtttgtgcaggaatacaaaccctaactaagacaaccaccctttcttttgaggtaagatctcttgtagacaagtatggccttgaactcctgaaccaagcctagctaaatttgttctttatgtctgaaaagaaaattcagttgagcatatatgacactcagtcctttgttgatggccacttaggttgattttctcttcaaaggaaggagtcagtgatgaaggtatctttctgacatgttttcttggagctgttttgatttttctgttttgtgatctgttgaatactttgtaatggcagtaataacagcacctactcggttccatcttacaagggaaattgatggcccttttcgtgccataaatcgttggggactaaagccatttgcactcaccaggaacaatatagagtaaacggtctccaactgcttgtaggctggaagccgggactttattttctctgtaccgttcttcaagatggtggataaaaggtaagaagcctgacacaaaggagcggcagcctgcagccatggctggtggtgctgtggctgctggtacagccataaaaggtgacccttaggtttaaaagccaaagaaggggaaccccactacagcagaaactctggcctggttagggaaactggcaagtgcttcctggtctcctctgtattccagagaggccccagagaaaagaaatacttagacacaaagtctaagttagaaagagaaagaggagacccttgctgctgtcacacaggcagctggtgatgataaggatggcattacccaggactaagcttcacgggatgccctggacctgggtatgttcctgctgaagatgtgtgccctggacctgggtatgttcctgctgaagatgtgtgcctaggacctgggtatgttcctgctgaagatgtgtcttggaaactgacacaatcatggtgaaactggagaatcatggcgaaaagcccttcagcaggtatgtgagaagactgtgtgcgcgcatcactccttggggcattcctgatcaccctcgcctggcaccacaggggcaaggagtggctttcctgaagcagcagaccagtggctgctacttgtgactcgacctcttgtcttcagctacatagaacaccctgaaatttgtcatttccacctctacaaatactagcaaggttaattaaagacgtttaaaggcagctgtgttcttagtagtttagccagttctcggtttgttgctgcagtttgttcttgatgtgggctgtatttcctgcattgaccgtgggaaaggacaggttatgaaaggactcagatgtccatctcaggtaaaagtggtgcatttggggcctactaccaaggcttttagtgaatatgctgtgtgtaacagtggcatactcccacattgtagctgaagacatgagcgccaggcttagcaagcctaagcctgcctctcttggaagcaagtgcagcctgtaaagggacatgcgtagaagtggcacaggtggagggacaggtgcatttctaaagggttcgtgtgttcttccctccctggctgacttgagttcagctgtgattcccggtgcttgcttagccatcatgggccacaaggaaccccaagaaggacagtcatgtacagagaggccaaaagaggaaaggaagccagcgttcaagagttgtgagggagcatgaacaaccacccagcaccttcctgcagccaccttttcacaactctccccagtcccagcttagatactgaaggcaggctggggcgtgggtgtgctgtgtccctctctagggtggctggtgtgagtgtcctcattagagcctattgagagtggagaagagtgggagaggaagcacccagaacaagtaaaggaagacacaaagcagtagatttctcaaactttttcactgtccacagacagcgccttatgagcatcgttgtcattcagaactcgcgcaaggaggccatgagaactgttcccagccaacagtgagccagaatcatacatgcagcaaggaacacatctgggctcttaggtctttataagttcatgtgcttttgaaattctgctttggcaaacatatctccccccctccaagataattatgtgcaaattgaatttctttatttccttttccttttgttttgttttctgaaacagtatcccactttggagccctcgctgatctggaactcacagagctatccacctgcttctgcctcctgagtgctgggattaagggcatgcgccaccttgcctgactctattaactacatgagagtctttgtgtaagattaatggcgcaacaaaatgttgtttgtgtggcctggcttattcctgacatgagcaagagctcatatttcccatttaaagtaacgtgatatatgtggttggaatctactagaggtgggtatgggtgggtctgtctctctgtctcccagcttcactggaatagcccttggctggcctggaactcactgtgggctgacctctggcttgcagtgaccctccctgcctcagccttctgagtgccagcatgataggcttgagcccccatgatggcctgcctttccctctgcttttagagtgatgtagtattcttaaagcacagatgttgtacttaagctcccttgttctgtgaccttagaagggtaaatgtccccaagtctgctttctgttaacttttgtggcctgaggctttagtctcatgccttctcttcagtgtttccctgcactccatatcagatgcaccctgcgccaaagtctacgtgtggtttttaaaatttacttctgtctcttctgtatgctcggtgatttcctcagattcatacttcagttcagttccctgacacctcttcagctgtatctgatacactggaattctggttgaagtttctgacatttaaatatacacacaacaggcagaagtgtctgacagataataacgtgtaatgaaatgtaaaccctgctgcccagctgggaacagattacgtgagatactgagtaaggtaaggatttaaaatggtgtgctgggtgaggtgaggtgaaagttggctagtttgtcatgggtcctttctttggagtgctgttctggaaggtcactagggtagactgatgggaaatggtgtcagagtgccacgcctaatcctgattgtggggagacaactgggtgtgttgtttgaggcagctccagaagggattaaccaagtggggcaaacccgtcctgaccatgaatggcaccatcccctgggcacctggatggaatgagggaaagaaggaagtgcactggaggacgaacattgggggaagcgagctggaggaaatgcattggagggcgcacgttgggggaagcgagctggaggaagtgcactggagaacgtgcactggaggaagcaagcaccctcctcctagtgtgccctctgcagtttgatggaccatgcctctgaaccctgaggagtcttttcttatttacactgtttctcttaggtatttgtcaccgaaaactgaccatctcacagggtataggcagagtcaggatagctagaagtatttatgaagcagttgccttttgtaggccttatcattactgatagagaagtgatgctcccgaggaaaagaagagatggtctgtctcctgtatgataggagcaagggccgagagctcgtgggttttaaagaaggaccttctctttgaatcaagttttcagttagcacaggtaagcgctctgcgcctggaggttgaggattactttggaagttgaaagacagacacaggagagacagtggcccggagtggggatccactagagatccatcacacagttaagtcagagcaagcagagcgaccacagcttgttcttcggttgtgtgtacttgctgtaggacatggtgtcagtggagtagtgcatgcggtcaagatcaagtgtaggcttggaaaggaatactcgagagggacacctgcctggtgcagagcccgagcctccaggatggctgaggacgagtgcacagcaaggctgctgacagagggaggggaaaagctatctgagtcagggaccggaggaccgccctgactgcggcctgacgtggattcaaaactgcattgaagtgcagcagttagttcaggcagccggtggccatggtgtgaattagtaaggtgcgtgtacaggcagcctgtggccagggcgggactaggaccacatttttgcatgaattttttggggggacgttgaaatgttttaaacaaggatggttgtgtggaggatcagacagtgaagtagttgctgacgttataaatgtgcaggagtgctgctgactgccagggacagagcaggaaggtgtgagggggacagtagtccggtgagatgcttcaagggatttgtgatgtttgaggaatgatgctttgcaggcagtcatgtgaattctgcctgtaggagcgaacacacatcactgcttgagaggattcctgagaaagaactgtcctggggacactcagctagcttcctgtgagtccagggcgttcaaagaaacagactgaaaactcaaggttttctgatgaaagatgtctgttttagaaggtgtcaaaggactgggatgcggagacatgggggtgtgcatgccatgtggctctgagcccaggtggatgcagcttacgactctgttggccatggtaactggtaatatacggcatcgcggatgatggtcttaatctttcagggtagagtaaataataaatcctacttgtagtatgtgacaatttgtctttatgaggttgtcgatcccttggccagggaagtattcagacctctgggagcctgtcttattgtgtggtcagatctgtccagtgtaagaaggcatggctttaccagttatgaatcactgtacccttgtaggttagccagaaaacccacaccacattcattcatcatttctaagctcacttaatcatcttatacattaaaaagctagagctgctgtgggtctgtgtcttgccccactactggggtgctgggcagacaagagtggagatgttaggctgattttactctgggctgccactgtcgggtgctggactacagggaagcaccaacacacccctcagggggccggaaaaacacagtctaacatgtgggaggctgaagctggggcttccaagttcccaggtattcagtcgctgttggaaaaccacacagaggagtcgaggacaaaggattagaggtccacgggcctgcaatgaggctgggcctggagcctcccaaattcctggacatccaggcatacatatgtgcaagacatacatacatgtattatctttataaaaattgtaggcatttaaatatagtgacagtaattcattacatcacaggacaatctgggcaagacctccaagagtataacatagtgtttgttgaaggaatgaagcacaagtaagggccattcgttaggcgaagtcaagagatataaatgcagtgctgcaatgggcagagccagcaaaacgcatcaaacggaaacaccactttcgccgtcgtgaggtctccctttcctcgggggtgtgggttctgtggagcaggaaggacagaggaagggtcgtggttgagagagcctcctctagagtcggaacattagtgtgggtccacacgtgctgtcgtggggtcgggttcgagtgcttctcctggaaagctgtgttaatgcggatgcttacggagccttcttccatgatgtgtgtgccattagctgggaggatgctgctgtcgtcaccttagcttccttctttctgcccaccccgccccacccctggtcccttgagtgtggcgtctttaagctttattgattctctatcctatcagtgtaatctttaagtgaatggcttgtaaattttatgatgcattgttattgtgacatcataagacctgcctgttgacatttttcagtagatgagattaataaaaagtttaaagtatttaaaattatgctatcaataagactgccttttgatgtaaatatattagtaaaaatttgggaacatttttaagtgtttgctaattatggtgccttgggaagtcctgtcacgcgggactgtgtttcttactaataaagggagctaagtctgtttcagggtcttggaaatggatgggaaacagagaattggtaatattttcttttttttttcttttttttattaggtattttcctcgtttacatttccaatgctatcctaaaagtcccccataccaacccccccaatcccctacccacccactcccactttttggccctggcgttcccctgtactggggcatataaagtttgcaagtccaatgggcctctctttccagtgatggctgactaggccattttttgatacatatacagctagagacaagagctctggggtactggttagttcataatgttgttccacctatagggttgcagttccctttagctccttgggtactttctctagctcctccattgggggccctgtgacccatccaatagctgactgtgagcatccacttctgtttttgctaggccccggcatagtctcacaagagacagctatatctgggtcctttcaacaaaatcttgctagtgtatgcaatggtgtcagcgtttggaagctgattatgggatggatccctggatatggcaatcactagatggtccatcctttcatcacagctccaaattttgtctttggtaatattttctttgtttttatcttataaaaagataacaaagaagcccacattggtaatcagagggtcagctctgctgggtcttatgcccttgtaatgaacatagatggctactctttttcaatctttgatttcagtgcaagacattttaaaaaaagtctgtggttccactggttttaagtagattttttttctttctgagaactagttaaggctgggcaatcttacaaacgccctgaaccacagtgggtttcattatgctgaaagggaaggagcgggtggggcccctgtcctcttccctcaggaaacctggggtgccatgcgacagtgactttggcagatgggctgagggtgggcgccagcgccagcctggtaatgctttctgttcctgggctcctctctggcctggttggtgtctgctcagggacctgcttgttcattcagtgctgtcaggataggacgcaaccccaggagccttctcaggccccctgaaaccttgtcttccccctcctccatgttacatgtttactacacgtcattttcatttgctgattgtgtcttggtaacctctggattcattacttttaaatcttctcttttaaatctccgtatgtgcctcccatttcaaagcgtctactctcagtgcctctccggctttcctcccagtcctgcctatgtagaggtggtgctgtagctgcctttgttagggcctggctcagcacacttcagaggctgtcttcccgctattgccagcataactgggatggtttggagaaaattgcagccatctttctctgaatgtgccttgccttcagggagtagaggttactggggccctcctacctttgcccacagtgatctcacgtggaacctgtcctggcccttcttttcatcaggaggcagtgcagaaaaataacctaaaagtaggagtgctttgtcacgcatgcaggcctttggctggtgtgcattcttcataagtggtatgtaaatgataacgtaagcaatgagaaaaattgagagtggaaaccttttatttgtagattctaaattgattctttctgggtatgggtattgctaaagttaatttttctttacatcttttagtacatgaaattagtatgttaattgtttataacaaaatcataaatatttcaggcttcaatcttgatttttatttggcaaaaataaagaatttcgtatacacatttttacatatcaaaaaattaatctgaagaacgtgaaacttgcaagcctcgctgttttcctgtttactaaaacagtgatgggtcacagtggtgtgcagacgccagaccaccacgaagaggggtgtttgctctctggggaccatgtctggacagcttcacatgccacagttttgcagtatgacagctggggacagaagaggtctgtaggaaaacctcgagtctaggtgctttgccaggcggggtggggctttgcgttgtgggttgagtgcacactgtattgttttaaaaagacttttttttttttaagatttatttatatatgtgagtacactgttgctctcttgagacacaccaaaagagggcatcagatcccataacagatggttgtgagccaccatgtgattgctgggaattgaactcaggacctctggaagagcagtcagtgctcttaaccactgagccatctctccagcccccagtggaaaagactttttaagtgggggtgcttaaggggcagtttcaagacagggtttctgtgtacccctggttgtcttggaactcactctgtactgtatgtcaggctgacagacgtcctcctccttctgcctcctgagtgctgcgattaaagacatgggctacgacacttaggaaaagacgtaagtgaaacttaacaagaatatagattattagcatttacttcagttaattatcataaaatcagcatgccgagttaagttaaatggttcttgtgtaaccagaatcttttcttagccattttcctaacaccttttctttctaccagcaaagaaaacataatcccaacttataaaactgtagactgttgtcgctgcacacaccaagggatgggcttcatcgtgacctctactaggcttcctcttggtccatcctcttctcccctccagtaatctgtattgcagattagttttgtctgttttgagctttacactcacagaagcctgtggaacgtattttgtattgtgtttttatttgtgaaatccacgttctgtgtgaagcacagttcactgggtttattacaatgtcttatcacaatgtaaagccaacagtttgcttactccttatgcatgagtgtgcatttggtttatgcgtggacttgggctacgttcgtgctctctacattccatgctggtcttaccgccatgtttttcagtagcagccttggctgccgcattgaggttcccagtgccgtgtctccttctgaaaccatggctttgttttcttttcttttctgcccactcgtcccttttcattgtagacctgcataagagtgattacgataaccatgttatactaggctgttttaaaatctcctctgccaaaggaattaggtgttatttacaattcacccttaaacaagttcttgggacaaggtcagaaagcaaccacattctttgccaaaatatcacaagaatgatcgttagcctgcttgctaatattgctcccccctgaaacctcgtgaactgggcctccatagtccacattgctcttggtactcaagttcaactaccgttactagttcaaagtcccaaagtcttccacagtcctccaggagccatggtcaggtctgtcacagcagcagccctctgccaacacctaccttagttttccttagctacttttctgttgctgtattaagacaccatgaccaagacaccttatagttaagaatccatcatgacagagggaagtgtggcagcaggcaggcatggtgagagagctggaaacggagagctgagacctcacatctcgacccaaacaggaagcagagaacaaactggaatgactgtcagtcttcccccagtgacattcttcctccagcaaggccacacgcacctcctgaatcctacccagtccatctggggcctaagagttcagatgcccaagctatgagggacatctcattcaaaagaccacgtgaccttttgcctggtaacattgtagctggggatatttcccaagtcctctaggagggagggaggcagccatagcactgagatctctacaggcagatttctgcagccatcttcagactttatggcccttacatgcaccagttacctttctagggctgtgagtctctggaagtcagtagcctactagagctttcatgttctcagaccctagcagatggtttccagaacttgatccacccaggtcctgtgcatctccctgcatgtcaggggctgcttccatggctgctccctggcctcatttcaacacccccccaccccccaactcagttgtaagttatcagtttcctgtcaagatggcatctagctacagctcactgattcagggagcaccctccctcccaactccaaaagacccaggttcagctatgcctgcaactgggtttgagagccatgggcttgtcctgcggttaggactctcagtgacttcgctgtcagattttgcctcacctcttctgtgacttttacctactctctgtgacactgctcccatccacagcagtggcttcttgcctgcctcttacccagaagctgacaagccagctgttttcttccttggtacttgttgagttcacagtgccatcatctatcacaactctgtcctcatcacattttcatccttgggaataaatatatttaacttagaacttcaaaatggtatcaacaagccaggcgtggtggtgcacgcctttaatcccagcactcgggaagcagaggcaggcggatttctgagttcaaggctagcctggtctacaaagtgagttccaggacagccagggctacacagagaaaccctgtctcaaacaaaacaaaccaaaacaaacaaaatggtatcaacagaagattcatttttgtgtttttaagacttctttttcttctctgtttgtttctatgtctgtgagggtatatgatccgtgtgtgggggtaccacaggggacagaagagtgtcgagtctagaactggagttgtagatacttgtgagctgtgtggggttcacaaatgatctctggcttcctagaactgcagtaagaactcttaactgctgagccatctctccagccccagatttatttttttagttagcatgaattcttttaactttttgctagcttaattttactttcagagcttatttggaagacccaaggactataattaaaaaaaataaaaaaaaataaacaaccccaaaacaccgggaacttccttaatgtggccttaggaacagaaagaaacacactgtagctttcctttatttttctggtaaagagaattttctctttttctttttgccaacaggaaaatgcagttccattaaggttcttggtcatagatcagaggcttgggtctacaagaagtgagcttttggaagaagtacggtccaatatcatgggccagttcaaactacaatgtaggcagtggcaagctgcctcctccaccctctgaggaaaggcagctgtgagtgcaagttaccagagacaggaaggtggtcgagcgacccagtgagggtgtgtgtgtatgagtgaatgtgtgtgtgagtgtgcgtgtgtctatgtgtgtgtgcgtctgtgtgtctctctataagacgctcccagattcctgggaacagtttgaaagagtaaaagaagccatcctgaaaaggaatttgttttctttgtgcatttcatccagggcaagtcggctccagtttctcctggtaatgaagatgaacagctgtgagggaaacccaaaagcagcgcttaggttgtatcttgaagaggctttccgggttgtgtttgttgtgggttgaattttctaattgtgtgttttctttgcctacgatcctggtacaaacagtggtgaacacacttgtgcacagtcttgggcagactctgggtggacgggagtgacctaaatttcacagatgtgtcatagataaacaaccagctccaaaggggaaattggtttctgactttttttttttaattttttactattaaagtttttttttttttttttggttaatgtgccaactatttcagcttttttcagaagctcttgtgaaacagcaggataagtttcatttttttccttttttgacatactatttatattgaatctttgagaatgtcacatcatgcatcctgatcacactcatttcccaatcaacccttccatgtccgtccccacccttgtgaccaccctcttcccctaaaaaatgtaaaataaaagttaagaaaaaaaagtccagtttgtgttatctgtacactcactggagcatggtcagactctcagtggcctgcctcctacactccaggttcttttcaatggcttcctgtttaggccgctactttttggagggaggggtgagagctagaaaagccttttaaatcacatctgtctctttgtctgtctgtctgtcaggcttcttggcagtaagcacaggcaacaactcaccgagccatctcacagctctgcatttcctacataggtttaattttctcttctgtgtcatgaattataccaggaaatgttttgaatacattagacttgtgatgcatagttgtcagtgagttgctgagctttacccagttttcctagtgagagatgttcctaccttcccggatcctctgccaatgccccctgcagtaacagggggagctgtcagatgggccccaggaatgagaatggagtctccctcacagccctctggggactgctgaacttaggggaggctgtgtactgcctccataataatattcaaaagtcaatagctaaatccattgaaatgaactatagagtaagttagagagactgaaggcaggactaagtagttaagcccagttcagtcccaagcaccatgtcagctgacttacaaatacatacaacacttgctctaggtgacccaacacctgaccccaggtcttacacgcgttctcgcgaccggccaggaagaacgcaacaaaccggaatcttctgcggcaaagctttattgcttacatcttcaggagccagagagcaagagctctattgcttacatctttaggagccagagtgcaagagagcaagagcaagagcaagagctctattgcttacatcttcaggagccagagagcaagagctctattgcttacatctttaggagccagagcgcaagagtgcaagagccagagcaagagtgcaagcgctttattgcttacatctttaggagccagagcgcaagagagcaagagccagagcaagagagcaagcgagcaagagagcaagagcaagagcaagagagcgaatggcgaaaccccgtcccttttaaggagaattattctccgcctaggacgtattactccttgattggctgcagcccatcggccgagttgtcgtcacggggaaggcagagcacatggggtggaaaactacccttggcacatgcgcagattatttgtttaccacttaaaacacaggatgtcagcgccatcttgaaacggcgaatgtgagggcggctccccacacccaggggctcctgcacacatgcgcacagagacatatgctgatacatacacaattgtgagcataatttaaatttttttagagattaaaagtttgtgaattgtatgttttcaatttggtaagaaattgtatatgtatcataataaaaatttagatttatttatgtatgtgcaccacatacatgctgactgcctgaggaggtcagaagagcatctaatcccatggaactggagtcacagtgatgagctgccatgtgggtgctgggaatccaacctgggtcctctgagagaacaaacacttaagggtccaggttcagctcccctcaactgtatggagactcgcaactgttcataactccagttccaaagggtctgacatcctcttttggcttcccctcctccttttaaaactcgcagtcccgctgtatagtgcattgcattttctgggtgggtgagcaagaactccctcctcctcctgccgccctcactggtttgtaattgcttgagttctgttgggatgcatgtgtgctgtgagtgatgccccagcaagccagtgagtgggaactgccttcctgtgtactcttatccatggcctggcacgctcgggttagcacacttacaggtggattggcgggcgtatcctaacagcgttctaaaacaacgtgacgtgttattgtttacaggtcttggttttgcaattttccctttttacgcaacgatatttgaatatctgagggtttctatgctccacaaaagagtctaaattctgttgttttcatttaacataaaattttttggacatattttcctgctccccaactctgtacccacccaaccttatgttagctctttgctctttcacaaaaaacaaaaaacttaaaaccagaacatccccacacaaaaagaaatcaaaacaaaggaacagcaaaaccaaaagtgctcaaataaaccactgaatttgttttgtgttgggcggctgctcctgggtgtggggtttaccctgcagtgtggttgatgcacccagtgacactccattggaagaaagctcatcttcgctttgccagtgggtatcaattacagatagcttcttggttagagttcatacctcatattatacttcccctctcagtgctgggaccctgtgtggcttgaattagtgcaggtctgtgtgcacagtctctgtgagttcatacgtgcattggtcctattgtgtggagttaggttatccaccacctccggctcttagcatctttctgcgttttcttctgcgtggctccttgaaccttgaggggaagagctttgaggaagatatctcatttaagattgagtgctctaaagtctgtcacaccctgcacacggtcctgttgtgagtctgtgcaagaagcctgtctaatgtgtgttgagtgaagcactggtctgtaatgtcgttaggagtggttttatcgttctgttcctttagcatagtgagtgtgttaggttctccctaggcccagagcttacctagctctggttctttccacaaagcagtgccaagcagaggcccgtagatccaatcaagaagaggtggatacttgcggacatttgtgcagctggttgcagcagtacatcttgcaggaaggccatgatctgtaggtcacgggcttgtggcagggtggtcttcatgacggcttttctcctgaagcgtacggagactcttcagcaccatgacactcgtcagtaggggtgaagcttctaaagttgggtaccaccgtgacccctccgtgtttgatgacgtaagtaagtgtggtctgcagcaatcgggcctgagcagcatcaggttgtggagcggaaatagcctggcactcgcctgtgaagctgggcgatcccacagtgctcttctggtcagccgtcttctggcaatggagattcacttgagagcacaagtgtccagaggcactgtgttcctgtgttcctgttacctggaaactttacgtaggtcactttcacacgtgtctacctctcagggagcctccgcagcactcggttccatacggcttcccacaggcctttagtgttagttgtctgttagttgtctttagtctgtgtcccctcccttgggggatttctcctttctccttctccctggttccttacatgatacttaacctctatggttatttgataatagcacacataggtaaggtttcaaagctatccacacataagagaaaacatacgatatttgtctttttgctcgtctgggttaccacactcaggataatttttttctagtccacccatttgcctgtagatttcatttttcttaatagctaaataatattacagtgtgtgaatttatcagttgatggacatctaggtggtgtcccatttccagccattatgaacagagtagcagtgaacatggctgagcacctgtctctgttctttggatgagggtttctttgggtagatgcccaagtgtggtagagctgggtcttgacttagacggactcccatcgtcctgccgaacggccacgctgatttccgtagtggctgtaccagtgtgcactcccaccagcactggaggtttcccctttccctgcgtcctggccagcatgtgctgtcgtttgtttaattgatcttagccattctgactggggtaagaggaaatctcaaagtagttttaatttgcatttctctgatggctaaagctgttgaacatttcttttaatctcttctcagtcatttgagtttcatcttttgaaaattgtttagatctgtactccaattttaattgggttttctttatgttttttttaaagttatttatatagtttagatattagcccttttttggttgtgtaattggtaaagatctgtcgcctgctgccttgtccttggctatacaggagcttttcagtttcatgaggtcccttcactatttgttcttagtgcctgtgctgtgggtgtcctgtgccaacgagctcaagcctgctccccagcttctcttctaccaggttcagggtatcaggtcttcctgttgcagtccttgatttatttggagttgagttatgtgcagggtaatagatacagatttattctcattcttctacatgcaggcctccagtttgatcagcaccatttgtagaatatgctctcttttcttcagtatagttctgacttctctatcaaaaaccaagtgcctgtaggtgtatggcgtcgtgtctgggttttcattttaattccattggtcaacacgggtcttctctgtttccaaatgaaggttttgaaatttgtcttatccatttctgtggagaattggttgaagttttgatggtgattgcattgaatctgtagatttaacctggatcatttcttctttctctgtacctattagtgatacttttggtctttgcagagtaccccatattttcttaatgttggtttcttactgtggttagtatgtgtgcataatttttaagacaatattggatgttatctttaaatttttctgttcttgctgggcatgctatgtgtgtctaatatttgcagtccaaatactgaggcaggaggatggtgaattcaaggctgggatggccttcatgatgagccctgtttataaaaccaaacaaaaaattctaatttttatagtctaattatcacttaaaaggtttttttgctttttatttatccttattttacatttttaaaaaatttatatatttggcatcattttgttatatatgttatgaatttttctgcccacgtgttacccatcttgtacctcattgtataaatagtactttagttatattatttttttaaatattcttttcatttttttcagggtcacccaccaagcctggtgtggcttgcacacacatacttctttagctagtgggtaaatggttactttttagagtctcaaggacattctttgcttagtagtttgaagtaatagcatttggtatgtttaattcacaaatccacattccaaaatcagttcttttgatatttttgtttattctactgcaaaatctctcctttttaaataattgtggctccacagaagtgttgctttgtgagtgggaacatcctcctgaaacgagtctctgagtttcctttgtttctgtgtggtgatattttatctatactgtgctattcagtatcatgtaaattcctgttagtatttttatagatgatatgctaaagtttaggttcacctagtgacagactttatacttctacaatactatacctttttattcataaatgtttccactttaactcatatttctggtggcgttcagtcaagttcaatatatgtcagcccaaacatcttatatattttaggttcattgctggacagtttttacatttatttatttgtgtatgtgtgcatcttgaatatggagttcagaggaaacttgtggatgtcaattctgtctactgtgtgggaaagaggcagtaacaaagtatggctctcattcaccatatattcaacaataatggccaaaataactggccacaaagaattgtataactgcaaaggaccagagagatttgatgacagctgtcctagagcttggcttgcttagttggtcggtagagcatgaaaccttttttttgggttttttgttgttgttgttttgggttttttttttttttttttttttttttttggtttttcgagacagggtttctctgtttagccctggctgtcctggaactcactttgtagaccaggctggcctcgaactcagaaatccacctgcctctgcctcccgagtgctgggattaaaggtgcccagcaagcatgaaactcttgatctcagggttgtgggttcaagccctacattgggctccagttgtaaaattatatgaattatgctcatccccgactagcttcaaataaatgagactcaaactgtgatttcttcattaggcggcacaatgactggggaatcgcccctaacactaggctggctgcctcttcaactgtgctccccaaagttgaatcttcctgggttatttctgctccagcagtctggtgtcctggggagctatttgacttaggtgtgtgccactggtccatcatgaccaatgcagacctcctcttcccgccatcttctcctcctctgttctttctctctcctttttacctgctgagccatcacactggctaagtattcctaaacattgaatttgttactattacagctggaattagatcaacttttcattgtttatcacttgtgtatcagaaggcttttaacgtaagtggatatttgctggtgtgtgttattgtgtacagcgatgcagttcataaaggcattttcatatacagatatttcatgaaccttgacactctgcccatacgccctgccttcccccttcccattgttcttacccatcgccagaaccaatctcagttccacttgcacatcccgcacacacgtgattataatgcacctgtctgtctgagtctgacgactttcctaagatgatggtctgcacttggatctgtttatccgcaagtcgtactgttttattgttcatggctgaggaatgccacatgtcctttattgatttgttgattctatgtcttgacgcttgaatgttgctgtaaacagatgtgtgagtgtttctggcttgttgattcagagtcctttggtgtctagtgatacagctttgcccatgcagaagtttagatctatcctgatctccacaggggctggactaacgcacgttccccccagcggtctatcagggctccagcccctgccgtgtccatcacaccattttgctgctacttgttttcttaatggtagccattctgcctggtgcaaggcagagcaagttttggtggtcgagctggtgcagcacccattagcaagaacgtgccttgatagtggggtggttgccacagaaacttttccactagggatgtaattagcatgtaattttgcagtgtctagtagttaaaaatgagaaggaactggtgaaaataattatgacacttgaagcttatatgttagtgtagaaacaatgtagaaacacgagacattttattcttattttttggtggtttgtggtgtgttcatgtatgcgtgtgtttgtgtttgcgtgtgtgtacatgtgtctctgacagccagaattccaactcaggcatcattcctcgttttcaatctaccttttttttttttttttaaagttgaaatttttatgaggtagggcctatcactggcctggaagtcacaagtaggccaggctgctggacagtgagtcccagagattctcctgtctccctctccccagggttaagactgcaagtgtgtgttaccatgtccagctttctgttctacataagttctcaacatcaaacgtgggtcctcatgtctccaaggcaaacatgttaccaaatagctgttgctgtagcccctgccttttaatgttaagtctttcagattaactgtgtatcttacatctgcagcataatgcagtttagactacacagtgcttgctcagctgtatccaagtagtggctgcagtgttgcgctgtgtgtttgtgagtgttcagccatattgcctaccaacagcaagcccctctacaactttgaaaacatggtttaccttccttgatggtctttggaaggagcccagtgctcagtgacaggaagggggtctgtgcagagtttgcgtcgtctcacctgggagcacgggatttggattttccttcaatcgtgttcatttcctctttaagacatttgctctagagcagctttgtccactaggagtataagtaacagtttacaaggtctagacttgtattttaaaaattaagttaaactggtgaaaataattgtgatgaaaccttaactgcatgtataaaatgacacctcaattcaacatggaaacaatgtgaaatgttagtaagtcactgtgtactctttagtggtcatgggtgtgtgtgtgtatagaatcctcaaataatgaacttgtttttaattaagagcatatttctaagtattaagcataaatgtataggatgcttacgttattggtggcatggtcctaactgtatgttttctttccaagctggtctctggactgtcttcacgctaggcggggcaggcagcaaagcagctgcgtccccagaacttacatctcctctggccaaccagagtctcctgctgctgctggtgctggtgaacctgacggatgccccagacatacccaacccctacaggcaagctgtctcgtcatttaagaacacgcaaggttcgtggtggttttcccttgattgactttcttagcaagtagaggcttgttgtccccattctctccatcggtgtatagtttctgagatgagtgtcagaaaaaattggagtgtgttttctcaggcaggtcaaataaggcttagaggaattctgtggtcctttacgtctattcaatttacttttctttcagagacactccgagtatctgagtttcaatgctagggacattagcttgtgaaacctatatgacaagatgctttaaaattctaaagtctgtattttaggtaaagttttctaggactaagtactgtaacagaaataagcaaaaattttttgggggttgttgtctgtgttgcagcctcctccttgccctgcctatgacgtagggaagcagtgtgggtaactggagggaacagttgtgagtctgccccagtaattgtttcttagtgcaggaaggcgtgtgctgggggtggggaaggggtgcagggctgggcaggcccaggagctgtaactactgcccctaaagcagactgtaaatgggtagtcccatgcggacgtagctgggtgttaggaatcagaagtttgtactctgaaaggcaggatcctatgataggtgcttggatggccagggcaggtccagcactcatgcagtattaagatgagtaagaagtgaagttcttgggtaggattgtgaaggtgtctgagtcctagtaccactctgcttccctgcccgtgctgactgctcacagtcagggcattggggtgccaaggggtcatacctttctcactcttgaaaacaagtgcggagtcctcatccattcgtgctgctgtaatagagcactactactaagactcggtgatttgtaaagaacccagatttatctcttgctgtcctagagtctgggatgctgacgatgagagcctcagtgttcagcgttgctgagctgaggcccagctctgcttctaaggcactgccttgaatgtggattcttgccttgaatgtgggttcttgccttgaatgtggattcttgtgtgggaggcgggatggaaggctcttgctgtggaaagcctgctttatcaaggcctaagccctcacaagggaggagcacgcatgcccaaaccacttcttgaaagtcctgctgctaccgcattggcagctatgattttacatgcacttgggggacatgggcattgaagccatagtgtaagtggggagtcagttcagttcagtggatggaaatgtagacctgggtgtggttttctgttccattactgtcctcagtttcttagtgacagtgttacttgatggctaagaaagctagttttggagctgagctgagctgacctgggttcgcaccacaccctgctcattttagggtgagatctttggcagtttatataatctcaggagccctcaatggtggtgtctgcaatatggatatacaatcgtacaacacttacataaataccaagcaagagtggagtgttaaccacagcgaggacacagcaaggactcactgtatggtgcttacatgtgcaggtaggactgaccccacccgagacctcagaattgaaccgtgtctccgcttatccttttttgagagactcttaagcagcacagaaattctaggtactgacatcagagtcaggtagactataatctctgtctcgggtggtttttaagaaataaaagcttttactgtagtgtagattcaccaccagtcatggctattaccctgagaagtaatgtatcgtagaggtcagtctaggttttctcagggtacttgggaaattttattaaatctttctgaatttctatttcatcatttctaaagttgggcagaataatgcctcagtcattgtacagattaaataagggatactagacatacacgtctgtacagtggctccttcctgtcacttgctggctcagcatgtgtagatcttatggagactctcagaacacatctatgtcaagtatagcataggtcaccactatacttagtaagcactctcctctgctctcattgtaaagaactgctgtgtctagactcttctcctgtgagtcctgtaaaaagtatgtaatatttgtatattgctgtattgcttacttatcttttctctgtgacatacaaatagcaagttatggcaggaagggtttattctagctcatgggtggttcccaggtccagtccattatggcaggaactctggcagcagccgcttgagaggcagtcatattggatctacagtctagtagtagcagcgagtgctggctgcctgtgctcaccttgttgtctcctccctagtgttactgtgcttttatttagtctgggcccccagtccatagaacaggactgtaaggttgttcttcctacttcagctaacctaatctggataatccctcacagacatggtcagctgtgttctcacagtagtcttaatctcatggagactcaccattacaactccatccttgtcagcttgacacctaaatacatgtgtttcccgctgtatcctttcccctttccccattgactcatggccatctcataatgcacaatgcattgagtctccatagtctctaacaatcccaacactattcacaactcaccagagactcaagacagtctctcagctgtgagctcgtgtaaattcaaaaccaagttgcaaactcgcaagacaacataaacccctgtagcaccgttcctggcccctgtgctctttcgtgacacagctggaagatttgaatggctccggccctggcagctgcaggaaatgctgcctgtcttctgggccatctgcactctgaacttggagctttccttaccagacatcctgcagtccttgtctgcccaacaagctgtgatgttctagtttaattctgttgctgtaataaaacactctgaccaaaaacaacaggagaggctcttccaggtcacagtttattactagaaaagtcatgacaggaactggggcaagagccgtgaacccagcattgcacgctagcttgtctctggctcactttcactctcgctcacaccttcctagtgttcttacacttcccaggaccacctgcttcagtatggggccacccacagtgggcggggctttcccagaacagttaattgcaaagacagttccctacagtcatgcagaggccaatttggtctgggcctccgtctccaggtactttactctcagatggctctgagctgcatcaagttgagaattaaagccagttaggccatgggatcccttactgcaccttagattttactgcagcttcatgcagtggcctcccagtcactcccaatcgtgcgtggcctggactctctggaactgagtacaagattccatgaccctgtcagtgggacattcatgtttacaagtgcagcacaatgtggctaggttctgccgccagctcaggccggagcccgggcctcttggactacagtttcatcaggctttgtgctgatgctagggaaacaccccctctctggttgtctctgagcagaggactccttcactagtgttctacgcttagccctcagaactgtcttcctgttgtccaggtggagagcaggcaccaaggtctttaacaattatacgtaatttgtcctctgcactcttgtctgaaacatcaagggactcacatactttcttcctgaaattacatttttccttccctttccctacatctttgctcccaccgtggacctgcatgtgctcacggaagccagaaggtctcgaggagctggacatgcacgtggctgcgagccagctgagcgcagcgaaaggaagcaagcttgggttctccggaagagtggtttgagttttaaacaccaagccttctctccaaccccttaaagtttcttttaaataaaagagttttatggtagttgccttagcttgtgtttcatatgttgatttttctcttattttaaaactaagtcatatgttgatgttttagctatttttcttaaaaagggatcaatagttgtagtcagtgcttcagttgtggcttacagtttgaagtgctgtaaccattatgtatgtgtaaatacacaactcacaaaatacttatgtactttttttatatatttttgtgttgattttctgtatttcagacagcagtccgttcccatcatcaattcctcataccttccagattaactttaacagtttgtacacagccctgtgtgagcagcagacgtctgatcaggcaacgctgctcctgtacacgctgctccaccagaacagcaatgtcaggacgtacgtgctggcccggacggatatggaaaatcttgtaagtatcaagagacacttgccgtgtgtgtctgagacattacagagggatgcgttttctttcccaagaggctcagagtgctcacctggtggccgttcaggtggtgctggggagacagatgagaaatgtccccagactgaggtagaactgagcaagcagcctaggtcttgaatgacagagcctttgtccttgaggtcctgagcagccacctgttgcccagggctccacctgagcaggttctccaagcagcatcctctgtacccaccgaggacagctgtatttcttcatgttccttctagctgatgagggctgtccaccgctctgttggtcatgattgccacacagctctgctgacagtgatgagggtcagggtgactgtcccagctagcttcccgaggctctgtcctcacagcctccaagcctgtgcctctgaatgcagtactgcactgttagtcatttcagggcccctggccagataccacttaaaggttcactcagtgaataaaatcagttccgcagtttgtcttggtcttggtggacagatctcctttaggcagccatggctttccattgaagctaatatttaccatcagagtttcagtaaagggaagggtaagttaccgtgtgcttgagatactgtgacctctcactgcactcactgacacacggtcatttctaaaggagccagcagttggctgacagcaacagaatgccccccttagctctgcagagcaaacaaagcaccactggacatttggtagcttctttattggttttaaatactatgtaagtgctgaagaaacataaaatatgagcatattttatcacagtggcattaagaacaaaaggtgtgatgaactaaaatctgtctccacaccagaaaggagtgggaatcgtggtaaagtccgcatcatgagcagagctgtgattcctggtgggcatggggatcacagagatagttgtgtgtgtgagagagatgaattctggggggattttggcaatgagcaggaagcctggggcatgacttgtgggcttctgtggtgcagatgttggcttgtgagatgagagcacatctgtctccagtttgagaacacacactggtaaaaggctccaacagtgggtcacagccctttgggggtcgggtgattcttccacagggatcacataccaggtatcctgcatgtcaggtatttatgttacaattcataacagaaaaattacagctatgaagtagcaatgaaatcattttatggctggaggaactgttttaaagggtcatgacatgaggagggttgagaaccactggtctacaaggtttcgtttgggagttttaggagcataaagaaggatttcaataatttcctagctcatgtccttatctttacagttctctttctgatatagtaaatattggttgaggctgttacatgtatatattgctgcaagtaggaatttattctgccgatctcatttttaaatagttcacagctcctttattctatagactctgatattcaaaagttgatatttcatctccacatatttctcagatatgttgtatgtagagtttttgtgagaaagaggctagatctgccactcttcagtgtaggccctacctagtggcatattttgtgactccattcatataagacttgaaaatggtgacagccatacagccatagacacagttgtgtctctgatcactaggtgactgttacagtctgtcctagtcagggtgaccattgctgtgatggaacacaatgaccaaaagcaactggggaggaaagggttatttcacttacccttcttggtgacagtccatcacctaaggaagtcaggacaggaactcaaacagggcaagaacctggaggcaggagctgcttattggagggtgcttgctcctcatggtgttttaacttgctttcttgtagaacccaggaccactggccctgggtttgtcccacccaggatggactggtccttcccccatcaatcactaattaagaagatgccctgtaggcttgcctgcagcttcatcttacagaggcattttcttcatcttatgtcatctctgatgactctagcttgtgtcaagataatgtaaaattagccagcacaggtctgtgtctgaaacatcatccaagggcttacagtctaaacatgcagcaacttgttgggggattttcaaactcccatatcctttagggaggaggtgaagcctggctggtagaaagaattagttcccaaggcatgtgctcctgaggcctgtgcccagccctgcttgagatcccaggtttctgttttctggtttgtaccttgtgatatcactgctatggtctccatcatgccatccttactgtgacatgtgagattcctctgaaaccacgagccaagcaaaccgtccctccagcgagctgattcttcccgctgtgttctgttttggtcacagtgacaggaaaataacttggtgagagggaaggaggaagagtgatcagggactgcgagctaaagggcctgaggtgattgaaataatgaaagcaggctaaagttagttggtaatagttgctcagatttgtaaatctaaaaaccatttaatgatacctttctttttttaaaaaatgaagggattgtgcaatatgtaagtttactattccaatacaaatacttaaaaggaagaattgatctgttactttggcatagtcctcttggacccatcatcttaaacttttaatttgtttatttttggaggcaggggttgggagggttgttcgagacagaatttctttgtgtagcctggactgtcctagaactcaattggtagaacagcctggcctcagattcagagatccttctgtctgtctgcttctgcctctgcctgctgggattaaaggctgtgtaccactataccctgtatatagactcttttaactttttttttttttttttttggtttttcaagacagggtttctctgtatagtcttggctgtcctggaactcactttgtagactaggctggcctcaaactcagaaatccacctgcctctgcctcccaagtgctgggatcaaaggcgtgcgccaccaccgcctggccgactcttttaacttttaaaagattttttaaaaacacatctcttcctccatgtgcatgttcgaggttttagatctccaggtcctcttggattgctgcagggtggtgtatcatgggattatttcatcttaaagcctgtagcatactgtcccgggagtcagggtaggagcttagggcaggaggagaggtagaagttttggaagaacttactcactagccttctttccataatttccttagcctgtcttcctcacaggcttgggagccccagccggaggttggcgcttcccacactgagctgagccctcctttgttgatcatcagtcaagagagtgcaccacaggcttcttgcccacaggcctgtcaggggcagcagagtggggaggcattttctcaatcgaggcttcctcttctaaaaggtctctagcgtgtgtcaagttgatataaaactagcctgcacagtctgtatgatagtttcatgcaatttaactattttgcccacatacttttagtgatgtttttttctaattagtgaagaatgaacaaattaactatgtgaaaggagcaattagaaatgaacttgtacatttgtgaacagggtcataagataaggtgtctgatcagagtcaccgacgactgtctcggggcaatgctgggaaaatgcaccatgggctacaacagtctcttatgtgaagcacagttttggattattagcattaaagtgcacgcggtacgaagtgtgcacattaacgtgcattaaaatttattagcagctaagcttttctgagcagctcaattcttttcttccttttttaattagagggagttgatgggacctcttaaaatcaccaaactgagcctaagtggccactggaaactaggttttctttagcaggacatctgtaaaggtgactttcttacctgggaccttagctatgtgtgcagagagtacatgcagccaagtgggtgtctgtcctctttagttatgaaaactgtatagcctaatgcaaaacatgtagaataacagtgtaaagttcttatacggtattgaaatagtataatattttatttcctaggttttaccaattcttgagattttgtatcatgttgaggaaagaaactcacaccatgtctatatggcccttataatcctgttgatccttacagaagacgatggcttcaatcggtccattcatgaagtggtaagtctccgtagctgatgacaggtgcagaacagaggggcttctccacaaagtgcatttacttgccttggggtttcacccactctccttctgctagagtgtctgggaggacttggaatagaaatggtgttttcttccggttcataaaccagtatagtgttctttaccctccttccctgctggacagctgttaaccactgttaaaacttaccagtaataatagataactcattgttcttctcacatgtatattattctcattaggatatgtctattgtacatcatgctgggttacattaggatatttcatatgaaaacacaatatattttgagcttttccctcattgttctcctaggacagttttacctatgaacttgggggtagagggttgggcttccatgacagctacctgtccccactgcgccgtgtcctctgccctgtgctccctttgccacggcctcagcttttgttactgtgttgtaaattccggccattctgacctggacaaggcatagtctctttgttgttttggcttgcatttctctgatgaccagtgaggctggacagtttgtgtgtgtgttagcttttcttagaattatctattcacatcatctgtccatttactaattgcattgtttgattccttgtcatttagtagtttgagttcttcctatattctcaaagtcagtcttctgtgggatgtctggatagcaaaaactttcttcctgtaggccgtttcttcactcagtgatgactttcatgcactgaagttttttgcttcctgagaataggacctttgtcacctgtgattatttcctgagcagctggggtcctgttcagggagtccttgcctattcctgtatgttgaagtattttccttctctctgtttcagagttttacatttgatctatttggacttaatttttttgttcagggtgaaaaattgggatctagttttatttttcaatatccagtttttgcagcaccatttgttgaagaaaccatattttctccagtgtccatttttgatatcttcatgagatatataaatacctatatatcatattctgtaaagttgtcttatttatattattagtgggttggaagaattctttatatatttttgatcttgtgcttttttccattgcagtctgttaatatagtgaaatacactgatgaatcttttcattgctattaaagcagtcctcccattcctgggatgacaccatgattggtcatgatgtgttaatttgtagtatgtatccatatactgtttggttaatctttgagttttgttagctgtgtcctaaggaacttgcatactttttctaagataacctttattgccttggtactctctggcagctctgaacagcagcaggagaacctgggtgtctcttctcactcagatgccgggctcctggagctcctgcctcacctggttgtctgtagaggttttttcctctgttgagaaggttctgcctctcagcaccgactctgacttacttttgcttcctaatcactaagctttgtttgtttttttctgttccttttatctgtgtgctgtgtctatttcatatcattttccatttacatctttgtctgctaatggtatcagtagatttcctcttgatttctggacctcgtcttttctccttcatctatttaagaaaagagaaggaagtccattcatgccatttgcttaggagaactgaagctctcagctcaccttttcatggcataacttaccttcagagcaaaatgaactcacagaaaatggtagacataccctttcccaagggagtcgtttttattcaaacttttcttctttattacagatattaagaaacattacttggtattcagaaagagtcttaactgagatttccctggggagcctcctaattctggtggtaataagaaccatccagtacaatatgaccaggactcgagtaagtatcccatggctatttctctgcctttgtggagtgaagaccatatcataaagctttaatcttatgaaatgcgattatgaaatgcgctagaaaattgaaatttaatctcatagaatgtgctaggaaaatgtggatcagcacttagcatattatattgctgtgtctatcttaatacttagtggctgttcaatgagatacacttggcgcgcaatggaaagcaggcagtgagattggagctgctgcgtgtgcttgctggactccggactctgctttgcccttttaaagcaacaacaaaatacctagagatgagaagaagggaaaatacaaatttagatcaggaagaaggtgcaagaggctgaggctgttgctcgactggcagtgcagctggcacgcaccagctcggctctaatcacagcacgcctgtaatcaaggccatcctcagttgtagaacggcttggcttggcttggtttggtttggtttgatttggtttcagcaggatcttactgtgtagctctggctggcctgtactggctctgtaggccaagctgaccttgactcaggtccaactgcctctacttacctagtgctggggctaaaggcttgtgccgtcatgcccagcatatatagcagatctgagaccagtgtaaataaattacatgagaatctgtcttcaaagaaaaacaagcccctcccccaaagtccaagagagcaaaaaccttgaaaagttggaaaaaaagaaggcaagcaattctgctgacctctggcactttagacttagccaatagaaatgcgttaccacggagagcagcatgcagaactcataggttgtttacttaatatttttaagtatttctgtccgtggggctcgtgtggatagctgtcccagtcgtttttattttgttttatctgagattgtaggaggcggtggctgttttaggagggagaagtccttgtgtgctggggagatggcagcatgcactccctccgttgctgtgtggtgggagggtctggagcagcacaccacagaggcatcactgttcctgctgcagacggcttcagtattcacaccgtggcgatgatcatctggattgttcagttgcatgtccgttgcttccatgggaatttggaaacagtttgacttcttagattgggaactagagaatatagatcctgggtgctcttctggcattagggccgttgggtgtatgttgcttttagttaaccttccttgaagtgtggagaagatgcggtcggtgtgttttaatcttgctctctctccacaggacaagtacctgcacacaaactgcctggcggctttagcaaacatgtcagcgcagttccgctccctccaccagtacgctgcccagaggatcatcaggtaagcacaggcttgaagcagacactgagctttgccttctgggtggtcttttaagacaggtcctatgccagggtcttttctaaacacgtgcaaaaacgacaggttttcctcagattctcactgctttaagaatacccggttctgttttgtttcctaacatagttgttgagcagagttgatggcatttgtatttggtcctttcatgaactagagtgttaggtctcatcttaggttgtttactggctttccagagacatacgcactcaaacgaaacctcaatcactgtgctaaatattttttataaagcaccactctacaccttcatagttttctgtgtttgtctttgaggggtttcacttttaattttggtagggttttgtgcaagtgctgtaccactgaactgccgcctcctaccaaggattccctccgtggctgtttaactttgccacagcagttactcctgttattaacgtaaatttgttctattcccattttgtaagctacaatcataggcctgcagaggtgcatctttcctggaggctcagtgggagggcctgctcgccagatgttagagcgccttgctccttgcttgtgctctctgctaccatcaagagtgggtgggtggttgagtccctgtctgatctcatggctccagactcctttttgtggtactgtcttccacttaaacattgcctaggccctacctcacaaatccagtcagtccccttccagccttaataaccttacagaatcataactgcatgctccttttggccaagtatagtaacatattaacattttctgaggagctatgatttggcctgccctaacatttgtcacccagttctttaaatgtaggaaagttaattatcaactcataactatcacttgcgggcttttcttatgcatataggtatttttattttccagtaggtggctcaatgttgtcttagcagttttcatggaagctgtaattttcttctttaattcttactcttaggacagtgcagaatttctctgacactggtgactggacccgaggctttgctcagcttatacattggtcccactgctgtcaccggcccttgtctctggcccttgggttttattggcatagggtctcaccatgatcccaagctggccttgaatccacccacaatcttcgtgtcttggcttcctgagtcctgtaattgcaggcacgcgccatcacccccagcggcagtcagtttggtgtgtcagactgatactgatcccagctccacttggctcatgtgtgccagtcttatattcgacccatgtgtctgtccatttgctgacctgggcttatttcttgtataatattacttattcattccccagaatatcatgcagtatattttgatcatctttatctctctgacccagctctttccagtttgtcctccatctccctactcggccaacttcacggtctccccctacctttgtaaaagcgtcattgagttcagtttgtgctggccagtgagtgactcctgggcgtggggcctgccctggagtgtggttgacactgtggagtgtgtatcacactgttacctctcctggccagagttcctcagctgggacatgggactttggggactttgtgaccaccttttcttcttctgtgctgggattttatctggcttgagcttgcacaggtcttgcatgttttcataatcatcttgagttcatacatgcatctgcctggttgtatccagaaaaatttggggtttttttgaagtcattcgcctttgactctcaaaattcatctgccccctcttctgtataagatccctgagctggtgtgtgtgtgtgtgtgtgtgtgtgtgtgtgtgtagacatccacttagggctgagcactccaaaggctcttattctctgcacattgatcagttgtgggtctccaggctaattgccatctactgcaagaagaagcttctctggtgagagctgagcagtgcattggtctaaagatgtgcagtaagacattaggagtcgctctaatgctgtatccctttaggggaatgaatggccatagtaggttttcctctaaggccatctatctagccatagccttgttagcggtgtgaggtatgctgacctgggctcaattttggtaactactctgaattaaattctattctttatctgttttcagaattcagtagagactattttacattgactcacaatagaattcatgtctgctctttgtacacgtgactgcagtagggtgggacatagtatgagattgtctggttagctgaccttgtactaacatgagctttatttcttaccaaaaatataattgtctcctcataccctggagtcttcctgctattctgagtagcccttagtttccaagagtgaacttgtacccctggctttattccagcattgggagtttaatggttcctgctgctttgtggtccttttctgtctgtatacatggagttttgcggtggcttcagattggttttcttataatgagtattttctttttctttctttttttttttttaagatttatttattattttatctaagtacactgtagctgtcttcagatacaccagaagagggcatcggatctcattacagatggttgtaagccaccatgtggttgctggaatttgaactcaggacctttggaagaggagtcagtgctcttaatcactgagccatctctccagcccataatgaatattttctaaggcctgtcccatatgcaaattccaaatgaattagttcataacttaagttctggtagtgtgttttagataaagttaaacacaatttcctagatgtaatagttagaaaaacattaccaataaaggcagtatgcccagtttttttgtagtccccaaaatagaaaataaaccaagataaggaatataggttagatgtgtgacgtgggagtgtttagatcctgtgaatggtgcttactttaccatactgggttttcttttagcagtgtgtgaatgagggattgtgttaagtaatgtaaggtatatcagaaccgatgataaggatctcgccctcaaataatttgtaactcagcagcagatgtaaggatctgtccttgtgtgtgtacggtataaagagcttacatagacaggaatgctgtagcagagtagaattcttagcatgggaagaggcggttggtcatagaacggtgagaagacatcacgtgaatagatgaagcagggtgatgacagcagacgttagatactgaagctctggaacacatcagtgacagccaccagggtgagggtagggtcacagtgagaaaggatccacatgagagccagcagtcccagtcccaggagagaaagaggacaggtgaatgacaaggtgaaggacaagagagaatgtgctcaacaaacagtatagacttgtattaacaggtccttatacagaccaccactgtgtgagtacatagcagtgaaaaaaaaaaaaaaacgggaaataaatttacacagttcgttcagttgccatgctgtggacatacacaggtttaaaagcaagaagtaagatgagctggagacttggggaggacctcaaatgttcaacatagcagtgaaggaatgaattgtagatgggactgagacaaagaagctatggcttcatagagtgaccctcattcagtgatcacgtcagaacaggcagattggagccagttcccagtgctgctgctgccgctgctgcctgtctgagctctgtatctgagtggctgctctggacagtgcatccttgtgatgtaggaaggcgctcactctgcaaaactcagcgccatcttcagatgctttgtctgcacagtgaagtctgggtcttgaaaccaagattcattctctaaggaaatgcttagagaatacagttacagctttttgtaactgaagagaactcgttttctaccaaatgtttgtacgtagggttagattgcaaggcatgggaaggactgagaagccatagctgtgcagagtccagggagttggagagccatcctgctaacccttcccagtgagaaacttcatgaatgtattctaaactctcttttaggaaaagtctatacagctttatatatgccagctgtaaaactcagaggagccagtattttatgtgaccttcaacaagatacaagagtcacatgttgctatgatgctatgagaggattttaatgaaacttaaaatctttcttagttggacataaatataagcaacaatttctttgtggtgccccaatttgttcatatttgattaacagtaacgccccccccttacacacacacacacacacannnnnnnnnnnnnnnnnnnncacacacacacacacacacacacacacacacacacacacacacaaattcttagtaccctagagaagtcacagcagatgtgatctgtgttttgattaacagatttacagattcttgagaaagtttgagaggagcatctaattagtgcgcccactgtttgaggtgagtgatttgtctgtacaggagtaggttatgtgtaaggcattatcgggaaaaacaaacaaaagagactgcatgcattgccgtttatttcctgactttaagaatttcctttagcctggcatggtgtcgcacccatttgatcctagtagtcaagagacagacataacatagatctctgtgagttcaaggccagcgtggtctacaaagcaagttccaggacagacagggatgtgtagagagactgtcttagaaaaccaaaaaccaaccaaccaaaactaaaaacaaagaaaagtttcctctgtgtctcgtacccaccagttcctgtttctggcttctacaccacggattaccaggcatttctcttcagtatctcatcctgtcttcatcttttctccaggaagccacctactgtacactcataggtgggaaacacctattgatttgtttatagtcaagatctgtctccattgtactgtcagttcagtgtagtgtaacagaaactagagccaactgtcaagggttgggatatcggctccaaaacttaccagttgtggtgtctccaaaacttaccagttgtggtgtcttggaaaatatctttaactcccctctgtagcatgtccccccaactgtaagatgctgtgacaatagtgactgttagaatcggaattcccggcaggtgtctgactccagcagttgccaccttgccaggtctgtgcattctcctggctccaaagcaagcaaaagtaaaagtgaaaaacagagcaagacggggtttatgaaaatggccgtcctgggaggagagtgagcgttacgctttaatggcggaggttttgggacaaggtgaagtctgcagtcattaaatagttttgcctaagagacatctggttgatctttttctctattgagaattctgcaggcggctcgaaggaagtccttattgcttgaggggacagcccattttccctggttgaggatgttctcagtaggagcaggtgtgtctgcgaggctctgctgtttgcaaatccaagctgacttgcaggtttagcacaatatctgaagacctttgggccctctttgggtctggaagagattgttgtaaagaccaacaataagggtgccttagttaagctgggcatggtggcgcacgcctttaatccaagtactcaagaggcagaggcaggaggatttctgttaattagaggccagcctggtctacagagtgagttccaggacagccagagctacacacagagaaacccaacccagtctcaaaaaacaaaacaaaacaaaaaaaccaaaacaaaattaaaaagctgccttggttacctttctccccatctccactgtagaagagggacgagctggggaagatggtgcggcctttcagactgagtctgcttggatggttaaagtttgcgtgcagagtaaagctggactctgcccagagtttttaagatgaagaagatagcaaaaggaagatgtggatatgaaatttttatcttgctgttagttgccctgcagaccccaagaagggattggtgccatttctaagtctttaattcccccttctgtttgagcagttttccacctcaggaaagtgggtgtcggccgtctggccgtgtgttagagcagtgagtgagaaggtagcaggtcctagtgcttgagacaggcaagggaaacggggccagctgaaacctgagagcagcgtgcatgccgtcggaggcccacggcagcagcatgcagttaaacactgcggcgtttctgaccttctgacatcgcagtgtgacaccgtcacagtcttgacaaatgtgtgatcaacagttttgtgctggtttctcagctgtatgtggcccctgggccacaggttgggcacatctcagaggtcttgtccaaggtacctggtgaaagaaagggctttgctctcagctcttccctatcccttctggcttccattacctttgcaagagatccactttgtaccacaggctatccttgaacttgctgcatggcctgcctgggatgagttgaacctaagtccattctctttcagcctctcaagtgccctggtatcttctgatagtcaatatttccggaaatgatgcaaatggtgatgccattggatgtaggcagaggtttttgatagtagcagtttacttgaatgggtgggtctcagcaagctcctgtgagggactctagagctctagccatcataaacgtgcagtatttaccaaatcccagcagtgcgtgtgatctgactttttcatagagaattcacttgttcttccccaatgcctgggcacagacaggctccagattctgccttgctgtggtctccgatgatcctcgtttgatcttggcagagcactagccaaggaaggaaggagaaatgtttgtcttagaaacctggcttcctgtacttcctgtggcagtggtactttgaaggcagagaagtttttcagggaaatttggcacggcttgcctttcagtttagtcttcttaagaagttacattaggagcatttacagttcccagttggaaatttctaagcttttaattgaactttgtgactgtgtagagagttgctgtatcatacagcagtgtcctggcaggcttggtgggacatgcgaaaacttcataattgatttaaattccagtttagacggctggcacaagcagaatgtttgctttcaaagcaggacagtgcccacttacccgaatctgctttcttgtaagtagagacctctgtggacagccttgccctgtgggaaatgaaccattaaactagcatgcttagagctctgtagactgtaacattgcatggtagaggtgcatggtctgcgacccttagttgtgtattatcaagcacccagtcctgtctcataaggaccagggattttatttttaccctacttttaaaccaaaaggatgacctgtcatagttttgtggcagtctgatgcatcgtctcttttcatatttattataaacgattgtcactaaagcagtaggggtgagtgtcctcatactgtcgtcttgctctccatgcccccagtgcagcttacagaaggtgggtaagagctgcacgtgcagtgtgttgtattctaggactggagccctgagtgtgagactccatggaaaacagtggccctgattcacttctgttactgtgacaggaacaccctgacaagaagcggcttaggagtgaatgggggcctttcgctcagttccagcttacagtctgtcgtggggaagtcaaggcagcaggaattcagcatcgctagtcaggaaggaggaggaaggaggcgtatgccctcttgcttgcacttagctaggtctctctgtcgtcttttaaaataggctttgagcaaaatgtccagcttgacttctaagggaggcatccttgctttgtgtgacagcagactgccccctgccgcagagagagacagacatccatgacaagacagttcacagcagcaggctgctcatggctctgctctttaggggatgcctcccagaaatctttctttgctgtgtatttctgatgctagtggaaaaggctgtcagtgttttatgggaaacttgtcatgtcccctgtggcaccgtggggttccttggtgaaccacccaagaaaagagtgaccctctggctgccattattgtccagagtagtcatttggttgatcccacttggactctctcttacctgtgtatccattggatttacgtcttggaaactgagtggccacatcagtcccttgattcccacccacatggatccttatgaatctctagctcactgttggtgttcagtcttggaagccttaatctaagtgaccnnnnnnnnnnnnnnnnnnnnagagagacagacatccatgacaagacagttcacagcagcaggctgctcatggctctgctctttaggggatgcctccccagaaatctttctttgctgtgtatttctgatgctagtggaaaaggctgtcagtgttttatgggaaactcgtcatgtcccctgtggcgccgtggggttccttggtgaaccacccaagaaaagagtgaccctctggctgccattattgtccagagtagtcatttggttgatcccacttggactctctcttacctgtgtatccattggatttacgtcttggaaactgagtggccacatcagtcccttgattcccacccacatgggtccttatgaatctctagctcactgttggtgttcagtcttggaagccttaatctaagtgaccttgatagatccaggatattttgagtgaaatattatatttggtaaaaattatattgcatcataaaattacagatttttttaaaacctttaacaatcatctctgacaacttttcacagttggcatatggcaatgtggagacttagagttaattatgattaatccacatagacattattgcaggagcagatatagaagtcagtttgttcagctcatgaaccagtcagtattcatataacaaaagaaagaagaaagagctaggctttgcccacgcttattctcgttcattttctctcttcctcactcccgctccctcctactactccctcccttcccctccccatcaatgtattaatgtgctatttgacatgaagcaaattagattcatttttattcctttgtttgtttgtttttccagacagggtttctctgtgtagccctggctgtcctggaactcactctgtagaccaggctggccttgaactcataaagatccacctgcctctcctaagtgctgggccaccacaactgagctacaagccaaggtctgtctgtctgtcttccttccttccttcctttatttttttttaagatttctgttatttatatgaatatactgtagctgtcttcagacacaccagaagagggcgtcggatcccattacagatggttgtgagccaccacgtggttgctgggaattgaactcaggacctctagaagagcaatcggtgctcttaactaatgagccatctctccaaattaagttcttaataaacattttacatatatcgtggactttccaagacaaacatgctaactgaagtgggaaaaacagaagggtaaagagaattaaaatgattatctatccagcgtacgcttgtactgagtcaagagcccctggagagatagagcagacaaggcgggagactgctcccttagaagacctaagagtgtggctggagacagggaactaaggggccattcacaaaacagcaaagtcctgccagggctgcccgaagagaaatgacttaacccacgtaaagcaccttggattgtatcgcctgctggatagtgtcacccagccagcannnnnnnnnnnnnnnnnnnnnnnnncctgctggatagtgtcacccagccagcaatggtagaagtagggaaagccgcccctgttagaggatacctacccatgtctgtctgtggtgactcaaagttgatctgtgcatggatggtaaaacttgtcactctgactgggtgtgtttaaaatctccctgactgtggccagaaggaacccctatgctgtgtggactgccttgtttggcatagttgccagctctcactaggttgctctgtggcagtgggtaccacccaagaaagtgatgtcactctgcctgttactgtgttatgaggaatagtttatagtaaatatctgatatgtcactgagttccttagttgtatgtccattgttcattttccagtgaagaaacacttaaatctcagaagtgacttgtctaaggaaagttaaccgtgctgggatttgaacctatgtctgtgggctacactgccttctattgccaagtgttctttttctgaagacggggtctcactgtgtagctgtgcttggcctggaactctgtatgaagaccaggcctgccttgaactcagagagagctgcctgcctggaggttgttctctgatctccacatgcgtccatgtatgagcatgtatggtttacatgcacgcactagcaagtaagaacttttctttaagggatcgagtcaccctcagctttcttcatccatagtcccgcctcgtcctccctcctgtagattattttgaacacttcctgataggatttcatttatcataaccacactgtgtaaagagaatcagtgcttaggaggactgatttatgatctgatgcctcttcaggtagtagaggatagtaatgtcagtgtgtatcccaccctcatgctgaaggcaagtgtcagccatagctggtctattgagaggctgcctagtgttagtcccagcggggacagctctgtgatgagtgtgactatagctctaagaggtatgcgctgtctgttatcgaggtgaggacatggaggtcagagataactcttaaacttactcaggctcaaatagctcaatgtgtgctggagctctgaaccaagctgagaaagactctgtgtgtgtgtgtgtgtgtgtgtgtgtgtgtgtttgaggcagtatcattggaattgctgtgcagtgtgtgtgtgagtgtgtgtgtgtgtgtgtgtgtgtgaatgagnnnnnnnnnnnnnnnnnnnnatttctgttatttatatgaatatactgtagctgtcttcagacacaccagaagagggcgtcggatcccattacagatggttgtgagccaccacgtggttgctgggaattgaactcaggacctctagaagagcaatcggtgctcttaactaatgagccatctctccaaattaagttcttaataaacattttacatatatcgtggactttccaagacaaacatgctaactgaagtgggaaaaacagaagggtaaagagaattaaaatgattatctatccagcgtacgcttgtactgagtcaagagcccctggagagatagagcagacaaggcgggagactgctcccttagaagacctaagagtgtggctggagacagggaactaaggggccattcacaaaacagcaaagtcctgccagggctgcccgaagagaaatgacttaacccacgtaaagcaccttggattgtatcgcctgctggatagtgtcacccagccagcaatggtagaagtagggaaagccgccctgttagaggatacctaccatgtctgtctgtggtgactcaagttgatctgtgcatggatggtaaaacttgtcactctgactgggtgtgtttaaaatctcctgactgtggccagaaggaacccctatgccatgtggactgccttgtttagcatagttgccatctaccacacattgcaacatgccagctctcactaggttgctctgtggcagtgggtaccacccaagaaagtgatgtcactctgcctgttactgtgttatgaggaatagtttatagtaaatatctgatatgtcactgagttccttagttgtatgtccattgttcattttccagtgaagaaacacttaaatctcagaagtgacttgtctaaggaaagttaaccgtgctgggatttgaacctatgtctgtgggctacactgccttctattgccaagtgttctttttctgaagacggggtctcactgtgtagctgtgcttggcctggaactctgtatgaagaccaggcctgccttgaactcagagagagctgcctgcctggaaggttgttctctgatctccacatgcgtccatgtatgagcatgtatggtttacatgcacgcactagcaagtaagaacttttctttaagggatcgagtcaccctcagctttcttcatccatagtcccgcctcgtcctccctcctgtagattattttgaacacttcctgatnnnnnnnnnnnnnnnnnnnnccgcagagagagacagacatccatgacaagacagttcacagcagcaggctgctcatggctctgctctttaggggatgcctcccagaaatctttctttgctgtgtatttctgatgctagtggaaaaggctgtcagtgttttatgggaaacttgtcatgtcccctgtggcaccgtggggttccttggtgaaccacccaagaaaagagtgaccctctggctgccattattgtccagagtagtcatttggttgatcccacttggactctctcttacctgtgtatccattggatttacgtcttggaaactgagtggccacatcagtcccttgattcccacccacatggatccttatgaatctctagctcactgttggtgttcagtcttggaagccttaatctaagtgaccttgatagatccaggatattttgagtgaaatattatatttggtaaaaattatattgcatcataaaattacagatttttttaaaacctttaaaaatcatctctgacaacttttcacagttggcatatggcagtgtggagacttagagttaattatgattaatccacgtagacattattgcaggagcagatatagaagtcagtttgttcagctcatgaaccagtattcatacaacaaaagaaagaagaaagagctaggccttgcccacgcttattctcgttcattttctctcttcctcactcccgctccctcctactactccctcccttcccctccccatcaatgtattaatgtgctatttggcatgaagcaaattagattcatttttattcctttgtttgtttgtttttcgagacagggtttctctgtcttgtagccttggctgtcctggaattcactctttagaccaggctggccttgaactcataaagaaccacctgcctctcctaagtgctgggccaccacaactgagctacaagccaaggtctgtctgtcttccttccttccttccttccttccttccttcatttttaagatttctgttatttatatgagtatactgtagctgtcttcagacacaccagaagagggcgtcggatcccattacagatggttgtgagccaccacgtggttgctgagaattgaactcttaactaatgagccatctctccaaattaagttcttaataaagcatttttctcactgtattatacatatgtcatggactttccaagacaaacatgctaactgaagagggaaaaacagaagggtaaagagaattaaaatggggtttggggatttagctcagtggtaaagtgcttgcctagcaagcccaaggcactgggttcggtcctcagctccggaaaaaggaaaggaaaaaaaaaaaaagagaattaaaatgattatctatccagtgtatgcatgtactgaatcaagagcccctggagagatagagcagacaaggtgggagactgctcccttagaagacctaagagtgtgtgtggctggagacagggaactaaggggccattcacaaaacagcaaagtcctgccagggctgcccgaagagaaatgacttaacccacgtaaagcaccttggatcgtatcgcctgctggatagtgtcacccagccagcaatggtagaagtagggaaagccaccctgttagaggatgcctaccatgtctgctgtggtgactcaagttgatctgtgcatggatggtaaaacttgtcactctgactgggtgtgtttaaaatctcctgactgtggccagaaggaacccctatgctgtgtggactgccttgtttggcatagttgccagctctcactaggttgctctgtggcagtgggtaccactcaaggaagtgatgtcactctgcctgttactgtgttatgaggaatagtttatagtaaatatctgagatgtcactgagtaccttagttgtatgtccattgttcattttccagtgaagaaacacttaaatctcagaagtgacttgtctaaggaaagttaaccgtgctgggatttgaacctatgtctgtaggctacactgccttctattgccaagtgttctttttctgaagacggggtctcactgtgtagctgtgcttggcctggaactctgtatgaagaccaggcctgccttgaactcagagagagccgcctgcctggaggttgttctctgatctccacatgcatccatgtatgagcatgtatggtttacatgcacgcactaacaagagcttttctttaagggatcgcgtcgccctcagctttcttcatccatagtcccgcctcgtcctccctcctgtagattattttgaacacttcctgataggatttcatttatcataaccacactgtgtaaagagaatcagtgcttaggaggactgatttatgatctgatgcctcttcaggtagtagaggatagtaatgtcagtgtgtatcccaccctcatgctgaaggcaagtgtcagccatagctggtcttttgagaggctgcctagtgttagtcccagcggggacagctctgtgatgagtgtgactatagctctaagaggtatgcgctgtctgttatcgaggtgaggacatggaggtcagagataactcttaaacttactcaggctcaaatagctcagtgtgtgctggagctctgaaccaagctgagaaagactgtgtgtgtgtgtgtgtgagagtgtgagtgtgtgtgtgtgtgtgtgtgtttttgaggcagtatcatattggaattgctgtgcagtcaaggatgactctgacgctctgccctcacctgccaagtggaagggattatgaacatgtaccaccattgagtggatgctcacttcatgggcatggtagtcttgtttgttttgtaattatttcaacagtcttgtttcaagtgtggtctctaggctctagggggcctagaattagacttcttttgccattttcactgtagcaatccttagcaaaactgctaaaaccttagtgtaaacccaccttacactgtagtaggacctagttagtgccttccctctagccttagcctcaatccaccaacaatgtactaagcccaatgccttccctcaggccttagcctaaacccaccaacactgtgccttccctccacacatgcttacagcaagaaaggaaagccattttcacttaaaataatccttgacaagactgtatgaaagatgaattgtaatgaatgttgacttgagtacttgtggtgttcatgttttgtgtgataaaagtttccacagcacatatctgtccactgctctgtttgccttcagagagagcacactagccactggatgggatataattttgacatgagaaaaccagtagcaggcagtggttatgtaaacttggcattttctttaaaatgaattaaatgagctgacttcaaacaggacaaccgtgggtgttggttacaagttaagagctttttttttttttaattgactttgcttcctggtaacgttaccactttgtaatcctagcgatgctggtaatgaatgtagggtttggaacataccgtgtgattaaatatgtcaacatttaggagctctttcgtaaactcagtgaagcaatatttttcatctgactagagagttattctttcatgaactatattatttatgtccacatgaaaagttttcattcttatttaaatgaactaatgcatattttatgttactctcaattttaaaatctgtctgtgaaatttattgataaaaacgcactttggagtcctcagaaatcttgtaagagactaaaggagtcacgtggtggagggagacagttgttctgcagtgtcctctcagaagatggcgtaagtagagtgcacatgagtgtgtgaactctatcatctgaattagttatgtccttacttcctcccatcaatataatcaatacttagctatgcttgcattattcatttttccatttaataaatatttattgagaagatagttatcagggagttggagtagagaggggctatatataacccgtttttattctctggggaactcgtgggctcttacagaaccatcgctggcaaacgtttttaggtttactgtgcaccctgcccttgtatgggcagggatgtgtctgggctgtctgttactgggtactagaacccccgacgacacagtggcctaaatcgggctggcctcgtgagctctctcagtgttggggattgatggctcagctgggtggcgttgcacttgaggtctcgcaggttttctcacagagggtggtggagtgtgaagcacaccgggctggccgagagccacttacagggttgactggaacgccgcagttctctgggtgaccttgccattgaagcatggccatctcagtgcagccagatcctaagcagcgccgtccggggacagcaggaactgtgctttcctgcagcctcagccggtatctgagaccattgtttctagcacatttaccagtcaaagggggccatagggcgcaaatgcagggagacgcagctcgcttgtgactaccgtattaactttggcttcataaattattccccagtgtacctggataatgcatgactttattcttaagtctgggcttaaaataaaattctacgtttctgttcaaactttaaaaaatacaagctgacgccgggcaatagtggcacacacctttaaccccagcactcgggaggcagagacaggtgggtttctgagttcaaggccagcctggtctacagagtgagttccaggacagccaaggctacacagagaaaccctgtctcgaaaaacaaacaaaaaaaaaaaagtacaaggtaatttaaatttaaactgtagtttttgcatttttcttccttgattcatctttaatataaacttttgcctgttagtttctgttgagaaggaaacgctcattatgcaccaaggtgcctttatttacggccagggcataaactgggaatctggagaaggccagggctctgctggctggctgctgcctctggctcatggagaattgccttgaagcctggggtagctgttcagtgtgtcaggtagatgccccaggcttggtgtccttgtggaggagactggagaaggcgctgctgcaatgctccccttggtggcgctgttgcactgcggctgccaaggaagcagctttgggatttcaccttttccagcaagcatttcatttgatgcagtggtggaccggactgtgggctgggcttcagagaactaatcacactcagtactgtctcagaagaaaaaggcaagtacctgattaactaagtccaacacagtttcacagctgcctaagtacccagagcctgcgtatggcctgacttgcctagacacagtgtgctgctgtgctgagaagagctgatttttaaaggcacagtttcctctacatggggagaaaatacaatttacaaacttgactgaggtgtcattttcctgtcgtgttaggcagacctgttgctgggttcagtggctgcggtgtggtgtgtcacattgtagctccatgcctttggcaatgtgtctgtctgtctgtctgtctgtctgtctgtctgtctgtgggctgttgacttcatgctttgcagctctcagtgcactgagagacggagtgcccttgggaagaagggttgggaactgaaggagactgacgggaccattatgtggaaaaggctgcctggggacatggctcagtgggtgaggtgctggccccacaggcctgagggttggagttcagacccctcagcatccacataaatgcctactagatgcagagctcactgtaattccagtacttagaaggcagaattctccagagctaagtggccagccgggctggtttaaatgatgaagtccaggttcagttagaagatcctgtcacagagtaaggagagaaatggaaaagactgggtcagccccagtccacaattcacaaacagaacaccaaagtatagaacaatgtgtgtgtgtgtttgtgtgtgtctgtgtctgtgtgtgttgtaaatatggggagaataatactcatttgtctttacatgcagatactctcgaaggataatgagaagccaaagcaagtggttatggggtgggtagagtgccagactttacactggctgtttctctcctcttcctgtataaactccaggtcattgactgtcactttgctctctgtttgtatcccaagtacccacaacaatgcaagccatataaataataattttagagaaagtgtttgccccaaactagcagttcacagatgtcaaaaccatatatgcatattgcagaaaacatagacaagctggaagctctccatgatgccaacttccaaagcgtcctcactgcagtccctttgtctcctgtgctgggattgaatccagcatccagctcctctctgtgcaagtgctttgccactgaacgctgctcccaactcccacaagtagttaagctaatatcatggtatatgttactctagacaattttctgttcatttaataatgattttaaagtaaaagctagtctatatatatgaagaattttgtaggcaagttccacagtgtatgactcattcatgctccaacgtataaacatggtagtctcaaaatattaactgaggattttattaagagaacaatagcagtggagaggctccaaggcagttcctttttgtaaggagccggagctcagtgctctgctctcaggtcggaggggcatctacgcttcagcaagaagcaggggagagggttgcagtctaaggagagcaggttgaaggtgagggattgctgatccctcaggttgcctggctaaggcatacatgttcacagagggatgtctgcctctgctcacctgtcccacttacggttgtgcctcctgcatgctcatgcccaggacagtgagcacctctgggcaaccactccatgctctcccctatgtgtctccactgttgggtttcaaaaggtttgcatttagaattacccccacctctttttctttcggagttgttgtttatacagagtttcttctatccacatactggtttacttagagtgggacgtaattgatgaaactgaagctcttctgagtaccaatagcgtgactggaaatggccgtctgcatgctttgtcacatatgttgagtgtcttcacagaccaccctggcaggaaagcacgtgctggaagcccttccttcctaatggggttgaagtctcatttgttcaccaggccaggccattgctttcccgagccacatcccagcctccgaagggtttaacattatagttgaattttctagattattcagagtgacccttgagaagccataagacataggagaaatatgattaaattactatagtatttaggattttttaaacacatttaattgtgtgacatggcacatgacatgacagacatgttaaagacaattggggaagtcacttctccctttctactgtgtgacttagggattgaactaaaaatccacaggcttagcagcaagcatatttacctcctgagggtgttttcaggtaaattcttttaaaatgtatctcaggcagctcccaaactcactgtgtagccaaggatgagtgaactgtggtatctctgcctccatcccctaaactctgagattacaaatgtgtagacccaacaggttcatgcatgaagttccatgcagacactgacaaccaaactacattcccagccctgcaagtagtatttaattttagaaatcagctatcttatgttgaacattggatttctttaaacagttgttgcttacaggttataagaagagggtaatgtaaagattctagccttccccctccgtgctgtacatagccctccacactgcacataccccgtccgtgctgcacatagccctccacactgcacatagccctccatgctgcacatagccctccacactgcacatacccctccacactgcacatacccctccacactgcacataactctccatgctgcacatacccctccacactgcacatacccctccacgctgcacacagccttccacactgcacatagccctccacactgcacatagccctccacactgcacataaccctccatgctgcacatagccctccacagtgcacatacccctagatgctcccatctagatttgcagctccatactgcatttatgaagagataagatgcgtgtgatgatttcagggtttaggtattttccaagctacatgtatgtttttctttcacttgaagctgtctctctctccccttctttaccacctgcttatgttttgaggctgtctactacttggccttctggtatcctgtaagtaactgttaaccctgactggtccaaacatgggtagcagcatgatctcatgtcattttttttttaaaaagttcttagaattgggccatagactaaatactaagtttgaagtattaagctcctgtctttaagtgaaaatagactttccgaaaagctaagtgttctcactaaacctttctttaaaaagtgttctcagcttgaagtgatatttttctttagctctgtgtgtgtgtatgtgtgtgttttgtcttttaggtttttgtttttgtttttaaagacaggatctctctattatgtagctctagctgttcctagaacttgctgtgtagaccacgctggccttgaatgccacctgcctcttccttcacgagtgctgggattcgaggagtgtaccgccgtgcccagctccattgtttttagctggtggcgatgacactgtgacatgctggaaggatttcaggtagcatcgtcagggttagaaccatctgtccatgacagaaaagtgaagcaccttaaacaaagagagccatttctttccaggtagaagttctctgaggaggaggttctgccccggtgtccctgtgctggctggtttccgtttgcagctccttcagagtcctcggccccatcagcttatcctggacaagcctttatccccgtcctgaggacagaatggagcttagtgcagtgcatctctctgtcccagactttacaaggctgagatccaaatggtctctgggctcttactggggaggctctgggggaggacctgcttccaagcttgnnnnnnnnnnnnnnnnnnnntagttgaattttctagattattcagagtgacccttgagaagccataagacataggagaaatatgattaaattactatagtatttaggattttttaaacacatttaattgtgtgacatggcacatgacatgacagacatgttaaagacaattggggaagtcacttctccctttctactgtgtgacttagggattgaactaaaaatccacaggcttagcagcaagcatatttacctcctgagggtgttttcaggtaaattcttttaaaatgtatctcaggcagctcccaaactcactgtgtagccaaggatgagtgaactgtggtatctctgcctccatcccctaagctctgagattacaaatgtgtagacccaacaggttcatgcatgaagttccatgcagacactgacaaccaaactacattcccagccctgcaagtagtatttaattttagaaatcagctatcttatgttgaagattggatttctttaaacagttgttgcttacaggttataagaagagggtaatgtaaagattctagccttccccctccgtgctgtacatagccctccacactgcacatagccctccacactgcacatagccctccacactgcacataaccctccacgttgcacacagccttccacactgcacataaccctccatgctgcacatacccctccacactgcacatacccctccatgctgcacatagccctccacactgcacataaccctccatgctgcacatacccctccacactgcacatacccctccacactgcacataaccctccatgctgcacatagccctccacactgcacataaccctccacactgcacatacccctccacgctgcacgcagccttccacactgcacatagccctccacactgcacatagccctccacactgcacatacccctccatgctgcacataaccctccatgctgcacatacccctccacactgcacatacccctccatgctgcacatagccctccacagtgcacatacccctagatgctcccatctagatttgcagctccatactgcacttatgaagagataagatgtgtgtgatgatttcagggtttaggtatttttccaagctacatgtatgtttttctttcacttacttgaagctgtctctctctccccttctttaccacctgcttatgttttgaggctgtctactacttggccttctggtatcctgtaagtaactgttaaccctgactggtccaaacatgggtagcagcatgatctcatgtcattttttttaaaaagttcttagaattgggccatagactaaatactaagtttgaagtattatgctcctgtctttaatttaagtgaaaatagactttctgaaaagctaagtgttctcactaaacctttctttaaaaagtgttctcagcttgaagtgatatttttctttagctctgtgtgtgtgtgtgtgtgttttgtcttttaggtttttgtttttgtttttaaagacagaatctctgtattatatagctctagctgttcctggaacttgctgtgtagaccatgctggccttgaatgccacctgcctcttccttcacgagtgctgggattcgaggagtgtactgctgtgcccagctccgttgtttttagctggtggcgatgacactgtgacatgctggaaggatttcaggtagcattgtcagggttagagccatctgtccatgacagaaaagtgaagcaccttaaacaaagagagccatttctttccaggtagaagttctctgaggaggaggttctgccccggtgaccctgtgctggctggtttccgtttgcagctccttcagagtcctcggccccatcagcttatcctggacaagcctttatccccgtcctgaggacagaatggagcttagtgcagtgcatctctctgtcccagactttacaaggctgaggtccaaatggtctctgggcttttactgggaggctctggggaggacctgcttccaagcttgatcaggttgttgagaaatgtagagctgaggccacccttaccttaagtgctcagcctggtaggccaggggctttgagggctgtcccactcagagcggaccaccagtctgctccttgtggccatggaaagctgggtgtaggtgttcacaggtctcgatcacttcagctattggaggtagcctcccaggcatgtcacaagacgtcagctagtcaggctctgtggctctgaagtttccaaactggactccggacccacaagagctgctcaggcgtttgtgcctcaaatgtgggaggccctctgggggcttcctgtctgttcttcccacactcaggcacagcccttcttggaggcagagtggcaggctgagtatttttaaggcctctgaaggtctctttgctgttcccctgccccattctcaggacactatagctgtgattccagcgcgccagggaaatggatgctgtttcgtctttgtcttggcactactctgtagagggaagtgcaccagactcctgcagaccaccgtcttgcctcagcctgttctgcagtctgaattatatttgttatccctacctccttttttaaaaaatttggtttgaagtattgggaattgaatcttaggtgttatgcatgccaggcaagtactatgccactaaataacactccagtccctggtaactccatttgacttgcaagatatcctttttttttttttttttaacattagaacatgaccctctttgggtagggaacatcctgcctattacagtttcctcagactgaaactctttttagtgaataaaaggcctgttcttatgctttctgtagcatttcagatcaaggcactgggtagagaggagagacaaagactaaaaggtgaaacgaggcactgggtaagctgagggacagtttctagcagcttcgcagagctctcgtaagcacgtgcccgtgcttctgtggcagtggcagccgagaaatagtctttatcccgcagttgcccagctgagaaattctatgagaaaaaagggatccacgcttcgtcagggaacaacaaacagnnnnnnnnnnnnnnnnnnnncgtctttgtcttggcactactctgtagagggaagtgcaccagactcctgcagaccaccgtcttgcctcagcctgttctgcagtctgaattatatttgttatccctacctccttttttaaaaaatttggtttgaagtattgggaattgaatcttaggtgttatgcatgccaggcaagtactatgccactaaataacactccagtccctggtaactccatttgacttgcaagatatccttttttttttttttttaacattagaacatgaccctctttgggtagggaacatcctgcctattacagtttcctcagactgaaactctttttagtgaataaaaggcctgttcttatgctttctgtagcatttcagatcaaggcactgggtagagaggagagacaaagactaaaaggtgaaacgaggcactgggtaagctgagggacagtttctagcagcttcgcagagctctcgtaagcacgtgcccgtctctgtggcagtggcagccgagaaatagtctttatcccgcagttgcccagctgagaaatctatgagaaaaaagggatccacgcttcgtcagggaacaacaaacagcctctgccccgccaggtgcatttatctcactagaatccaagagaccggggccttagtgtcttcgtgagcaattaaaggcccttagggtcacattggagtaaaatcaataaataagcagtgtatgtaacttgacggatgaacaccaagactatccctaaaagagcgcccagccttgatttgtttttttctactgtatatatggcacagtgcttttacagagtaaatctaagtaattatgttttgaatgaatcaaagcgttatcccgtgtggcatcttgactgagatagagctgcagaggactgctttcgttcttgctattgtactgagcctgagctaagcccccaggctgtacccaggctgtgcattttaccatgtgtgcatctttaattcatataatggcttaagattttatctttcacaaggatattttgaaatacagtttaggaattagacattcactttaatccgggagaatgttggtgtggcttgctggagcaaggctgaggtgaggagacagccgcatccagcttaggggccagcaggggaggagattccagctgagtgaaggtcattgaagtgaggtcttaggctcaggcctgtttcaataggtgcagtaaccaaaggaccatcaagctgacatcaaagaatttgagaatgtaaatagaactgattgttatcataaaggaattgcttgttctttatttgatgtcaagaatcttagcttctgggatttttgttttcaacctctgtccctttgcctagcagcaggtgtaaaagcagacatagacactaaccattgggtgcacgctactgtggcccacttcagatctagttagtgcttagttgtgcttggacgttgagattcctctgataagttttcagtcccaggtacgctagtgcagaagcctgcttcagttaggcattccagtgtctgcttatttgatgagagttgattcagattgctgctagctctgaggaaccaggtaaaaatgtactcactcgactctattttgttttgtaaagtgatcaatctggtacctggtgccaatatcagtagctttcatgctaaacaacgtgggatagtgttcactatgaccaccttcacgtgcatacacaacacaaacacaacacacacaatataacgtgcgcacacactgcctactattctgccatccctgtgaaagaacgaggaggacttgggccccaggaaaactgggtaaaagtaaagaggtgccctcctgatcttagggtcacagagctgacctggagtgtggttatctggtgtccttcgtcagaaaccgtggtcttaaagcttgggtttgttgtcctctcctacaaatctctcattttctttattggtgacaatggggatagttagggctctgggacgtcctgctcttctcaggctactttgttagcctttcttctgttgtccaaatcgctatttcactccaattgtatttgtgtgtgtgtgtgtgtgtgtgtgtgtgtgtgttttctcagatggacagacgagtgaatagctaaggggaaaatagaacacacttcttgaaagatgtttcactaaggtcagtcttgggattcactgagtttttctgtggataacattcttagaaaaatagcattctttagtatatttatgaagtctgtgctttttaaaggtagtgttcatttgattaaactctatgttcatttaaaaatatatttgtgagatacaaactttggtctcttatttctgtgtagattattggcctttctgcctggttttgttgtttagtcttatatctgctctgtggaatattatctgttggagggtagaatatggattcttctggagaaagtcttctttattaattataagtcatctatttcagactgccaaacaaagtgtagtgagtgtttgaattaaatatttagtgcctcattgactctttcctgtgacttccattaagaccctgagagagaattcttctttaatcagcctcttgtctgctcggatgtgcaggtgctctgaatgagccgtggtggcattcatagccagggtgtggccaagctttccctcgttcttatgtcagcatagttcccgtggaaggaagctgggaaagttgtgtagttatagtacatagctctgttttgagactcgtgagaatgatctggggatggaaaaagtatgagatgtgagaagtgcacagacattagacggctgggtaccaaagatttttcttcacaggcaaatggctgagcttatgctctgtatcctgagtttcttcctccccatatacagtagtgtattcagctagcagaagatagctctgccatagacaaccattctttgtaattccttttgttgttgttgttttgttttgttcttcgagacagggtttctctgtgtagccctggctgtcctggaactcactttgtagaccaggctgacctcgaactcagaaatccacctgtctctgcctcccaagtgctgggattaaaggcgtgcgccaccacgctcagctcttaattcctttttaatatttagttacttttaatcacatgtacattcgtgagtgcaggtgtcccaaaggtcaaaggccccttggagctagaattagcagtttgctagaagccacctgatgtgggtgctgggaccccaactctggtcttctggaaggccaccacgtattctttaccacatgttcatttccatccctgttactaaatctcaaggatgcttagaatttatcttatttatgagaaaacatttccctcctcggtgtataactgaccagtagagaaaatcatgacctaatatttgccaccacaatcaaaataaggacaaattctgtctcgaagcagccccttgtgctactttttattaggcctttctgccagctcataccgctttctgcctatggccttcctctgccagtgtactggaaatggagtcttgagaaatctgtgctaaccctgttcctgtgtgtctcactcctttttattactgagcagtgttctgttatatggccgtgctgtttatgcattcacccactgaaggacatttgggttgtttccatgtgtgagcaattgtgtatgaagttgccataaatatttacgtagagatttctgtgggaacctaagtttccatctctcttgagtaaatactaggagtggtgtgtgtcagttgagtggcaattgctataactttatatgaaactgctcgatgcatttgcaacgtggctgtagcatttggatccctgtctgtatcccggcacttagtcttgtcttcccacgaacgccattttagaggtctgggtgctaccttgtgacttgatttggcagtgactggtgtcctttctgctgaaggtcagctccagttctcacccccacacagcagcttctctgggccttctctgttagatttgcagaattctttatttcactttcaagtcattttgctatgtatcttacaaatatatttctaccaatatgtgacatgtttctcctagcatcttttaaaaaattacagctagcataccctttcatttcctcctgatacttaactcctcagggcctacagtttttgcctaacctcttgcttgatacagcttgtaccgtcctagattcaccatctttttgacaaataatcaagatacaagttgtcttgcttgtcatttgtacctaggatggttatagtctgaatcttcacctagcctctaactactgagtaaactgttggctaactgatctcatggaccataagaaagtgagggtgagagggaagagtctgaaagctgctaacttcatcacagcaggagctggagactccagtctcctctgctgacctagagcttcctaggacttgctctactcccctggcgcaggtccctagcagaagcatggccttgccttcctgtctgcatttagtcttctctcaggatcttgtccattctctagaactacgcctttcatatgtaaagggcatgttgattattataatgcaccccagttttaaatttgtgagaaatactgtgaattttatgccagaaagtccaaaacaaggcatagaatgggactggtcccagctagcagttagctcaggttggcgaaccgtgagattccctgggccattgtccactctctaggagaaaatggagagcttccgtttgtgtgcctgggtggctcccgtgattgaaccctttgcatttctgcagagtggagagatcgtgtgtttggtcttgtgttttgtttttaaaaggcagctaagacctcagagaggactcacggcagagggttcccattgtcactgattgatggacctttgctccgtgctgaggaaggaggtgattttatggttatggttatgactccaaatcatatcccacccttgctgtggttgtcagaataatataaaggtaattgtgatgcgtgaaactcccataagcaagctaacttggagatggctgagtgtggagtgccggttttgccagttttttcctgtaaatcagtgaacaacatgcctccatcctgtaaatcagtgaacagcgtgctttccttgccaagccctgggccaagaactagggcaacaaaaattaaaactggaatctgccttcatagagcttatgctcgagtgtgtcggaaaggcagtgagcagtacagcacccaagggggagagcacagagatgtgcctgagggccaggggtctcacacagggcaagatggaacaggccactccagggaagcacgggccgaaacccagggcctggggctttaacttccctgtttccggatgcaaggagctgagcctaattttaggaattcaaaaaccaggcccactgtaacatactgggacatcacggcagcagctgggtcctcggagccgttaggcagatgggggtgttgatctggggagatccaggcagtcttctgtctgtctgtctgtctgtctgtctgtctgtctctctctctctctctctctcaaacacacacacacacactatgagtgttgtttccatgatgaccttgttcagtgtggcaggcatgtgtcacagcacctgtctgggtgacagggtcagggatgtggaaactttggtatacatcttcggtgtccatccatgaccacagttttaaaatgactctgagaaggtcctccgttgacaagttgtgagtgtgatttctctccaggagtacttactctgatgttttaaggaccctagtagaatttcaactcctaattagatagtgttttattttgaatatattttgcagcctttcagaagggtgtgacacaaacacctaatgtgtctcaggagagctggttgatttcatggttcctggttatcgcatgtcactgagctaatacttatggcatgtatggtgaagaatcaaaacttaatcttttgaaggaattttacagtagctatgaatccttttgccaagagggagtttgtaaaatacattgactttaaaagtgagcaagccttctgataatcataaaatgcattgcttcgctgttctgtatctttgtaaatgcagtctttccattgtgttcatagagttcctgcccagatattcagtgtggatgggtacctgtggtctgtagagcacttcggaatcaagttcacagtccgtgctgctgttccttcagatctgattccttcagatgacttgtagatgctttagatgtcaaccagacctgttctctggatcgctacttcattaaggagcatgtgcggggtcacgtttcccttccaccccagccctaccgagtccagtttggcttttatgggagtcagcacctcctttgttacaaggaggatcacagtgacattggaaacaagctaatcaaggaatacgcttcagtcagtttctttctgtaatgctccctgcatctgactcaagtgttggaagggagtgtgcagtgagtgtctgctttggtcagttttagacttagctagaagaccacgaggcgagcagacaggaacatgctattagtacattgaagtgcaacttgaaaacatacagcaaactgcgttgctgcaacccatccagcttcgcatgctgcaaggccacattggcggttacagagcaaacgtcgggaacggagagtcatggtatttcttttaaaatggtttctttgtccaatgtcaaaagttttgggttttttaggtttttgttttgttttgtttttgtttttgttttgcttaagcaccatatagaaagaaatgctacccacacctgcaaatacagattggagtatcttaaaaaaaacagacgatggtgtatttcatgacgttcctcctgcttagtcagtatttttaggcacctggcatatgacacttactgactatacatttttttaaatttattttcaaatgtctgatctgctttggcagtatgagaaaaaaatcaatatatacaactattctgtgtctgtgtgtgtgtgtgtgtgtgtgtgtgtgtgtgtgtgtagttttgtaaatgaaactaatcagatcttagactacaagttgaaattctcacattcttagaaacaaatttaagatgtaacacgactaactctgtacctgctcccaggtgtgtgtctgatgtaacaagttctcacagcagtaagctagtaacgacaaaaattactgtctcaatttttctatttttttttagtttctacaaatgttggtttaaggtttttattgctgtgtttacttctgaaataagcggcttaaaataggataaaagtacttaatggaaactttttaattagcacagaattttattaaatatatctataatagtcaaattttagctaacaactttatactataaagttagggctttcttgttttgaatttctttagcaattgagaaaaaagtttgcacaaaaggtattaatattgctgacagttttggggaatgctctttttactggcagtggggtatgtggttacctcatcccttgagctggctcctgattggtacatcagtacatggcctgttcttgggctagtcctccatactaaacagtctctgagcggttcatgctagcaggagttcagctccaggaaaaatggcctgcactgccaaggagtgacgtgattcaaggtgctctccttccactgtggacacttgacattcatcccggattttctgggttttatttgcttggatatgagaattttgaactgtgtaaaaatagtataaaattgtgtgtttcggctattttgtaaattttttggtttgtggaaatctcttgtaaaaacctaatgtatgtttagttcatatacatgaacaaatcagagaggttaaacatatctcagtgagtgacattcaagttgtattttaatgaacgctactttcatattagcaagaagacagttggttactagggacctccatgtggtaggttcctactttctgtgttatggttgataaactctccttagaacaaccatcctcctctttctcctcctcctcctcctcctcctcgttctcttcctccttctcttcctcctcctcccccttctcccccccctcttcctcccctccctccccctctccttcctttctcaccgcctcatccccaaatctttatgagaaaggtgtcatattttagctagcaggttttagagggtaaagaccccagtcagtcagtctcactgggtcagcctctggggaggacttagcagcagcaccctggctgcgtgcaagcatgatgttagagcactcccttgccagggccctgctcactcttactcatgtgaagacatttggagtctcttggaagatgccatcctaaatgaactacataccacccttttaaaactctttaccctcatcttaggaacgagccttcagcacatgagacttgtgacagacgcaggggacccatatccagactgtaccatccatagagagagaacttagacctgtccttggagaagatgtgcttgactgtattaaaacagatagtagggttctctttaaggattttattttttaatttgtgttttatgtgttttggtgtaaaggtgttcaaatgggtgcatgtggctgcccagcacagaggtgtcgtttgcctgcgtctctgaagctagagttaaaagcagtcatgccctaccagatgtgggtgctggggactgcacttggggcctctgcaggagcagcccgtactcctaactcctaagccatcccgccagaccctggtgtgtgtgtgtgtgtgtgtgtgtgtgtgtgtgtgtgtgtgtgtgtgtgtttgtttgtttgtaaaatgtttttttattcctcatcttccttaccactcaaaattctgtagtggttcatcctcctgtctctaaatttaatgtgattgggctggagtggtttcctcctagtgtttatagctgggttttcatccccaggattgcaataaataaatcctaaaagtagaatttttttttacttttttattttatttttatgtgtctgagtgttttggccacttactatgtatgtgtctggtgcctgtggaggccagaagatagtgtcagagcccctggaactggagtcacagatggttctaagccaccatgtaaaccctgggaatcaaggccctgtcctctggaagagcatcagtgtgctctgaagggttgaactatccctccagccctgaagggttgaaccatccctccagcccctaacaaaatacatttgaaataaccttatggggatagcaaatgttagttttctcatcaccatgtcttagtttgggttgctataacaaaatgccatcgagtgtatatctttttttttttttaagatttatttatttattatatgtaagtacactgtagctgtcttcagacactccagaagagggcgtcagatcttgttacagatggttgtgagccaccatgtggttgctgggatttgaactccggaccttcggaagagcagtcgggtgctcttacccactgagccatctcaccagccccgagtgtatatcttataaacagcaaaatgtgtttctcatacttttggattccggaaagtctagggccaaggggagagtggattcattgtcttatgaggaactacttcctgggttttagttagtgggttttggtttttgttttctctctatgtccttacatacaaaaaaaaaccagttctcgagactcttacaaggacattagtcttgtttacgaggctgcactctgatgacttcatctagttccagttactttccaaagacacagcttcctaacactgtttttgtggcagttagaatttcagcacacacacgtcaaggggacctaaggaaatcagagcagtccccatcctagttatggatactacggctttgataagacaccgtaacaaaagcaagttcaaggagaaaggctttatctggttcagtccaaataaacttcatcaaagtccatcattgaaagaggtcaggacaggaactcaaaaagagcaggaacctggaagcaggagatgatgctggggccatggagggtactgcttactggcttgcttctcatggcctgcttagcccagcgatggtcccactcacaatggactgggacttccccatcaacctcttactaagaaaatgccctctccaggattgcctattgccagatcttggggagacattttctcatttgaggtttcctcgtctcagatgactcgagcttgtttcaagatgatataaactagccagcacataccccaacccatcttctttccccactttctggggtgaccatagccactcccaccttcagaactaggcagccatttcttctgggctctacggcatgtgtggtgagtcatacactggataatgtcttgagtcttctcaggttcacttcaaatttcaaaatggaaaccttactttttcctggtctttcttgaccagattttctcattcctgtcttagtaaaataaatggccgtacctttcatgtaatccagaaacccaggactctgttctttaccttttctgtccgtgtccagttcattaccaaaccttggcaataagcatgcctcaaagccatctatcctctgccgtccgaggtctcagcctccacccttcccctgtggactttcctgggtctgctgggaattctccctctgcagtccatgagcagaccgatcacttcaaaggcagagctctgcctgatgcactccatgctgagatcccacctcccccactcctcaaggggagctcccaccatgttcccttttctgtggtctctttgttgtcccttctgttggatgacgatgactcctcctcctcttcctcctcctcctcctcnnnnnnnnnnnnnnnnnnnnccctccctccctaaagctatgtgcatcctttacattttgtctaaatctttacttttacaggaaaaaatgttttgctacctatctggtcagaaaaagtttctcatctgtaacacttgaacataaccatatcaatttttttttccgagatagggtttctctgtgtagccttggctgtcctggaactcactttgtagaccaggctggcctcgaactcagagatctgcctgcctctgcctcccgagtgctgggattaaaggcatgtgccaccacgcccagcaaccatatcaattttattattagtcctaatactggcagcagttccttagtgctatctgatagcaaatgcatgtccactttatacttgattatccaaaatgtcttcattttggttagtctagaacaggaccctcatatgatcctcacacaacatttttatttgtgtcttagatattatgaggtagatgaactacaaatgttcattgtcctactcttttaaaaggaggccactgctttgtaatctagtacagcgtcccttcctttcctgctgcttgctttctaccttctccctgtccttgcttctttcccttctttccctcctcttttgagacagggtctctcacagggacttcacagggcctccttgattaaacaagactggctggccagttgtcactggcttctctgtgctgctccagccctgagatgaaagcccgagccaccatgagccgaggtttctgcttgcagaagaactttacaaactcagctgtttctggagcctctttttgcttgccttaactcagtttcttaactagttaacagacggaccatctcacagactctggattctggatttgtgctcttgcttcttccctcccttttgttccttctcattaatctctcccatgaactgaaaattcatgagacatagtctcctccagaagacagataatcaaattcagttttattcctgttttgtcatacttgaaatacatacaatcacagtgggcatggtgagacttccagcatacacccgatgatggtgtgacacttgagtttagattttacttccctgttactgcctcttctacttagtgacctttgaactactgatttctgcctgtcaggtgagttcctcagttataatattgagcactgaatttctaaggtagaatcccccaacagcactgcttagttggttagctaggattgctgcttatttttttcttttaatattcaatatttaattttcagaaacagatcctgattcctgtcttaactctgaaagaaaccagtatattttcatttggaatttctcatgtttgcttcaccttattatgaatcctaagatttgtatgtgtagtatacatatttcagttacttgataactaatcaatcatattttcatattcatctttgcttgctggaagacgtggcgatttggcagaagcccagtctcctgtggtagtttcttcttttgtttttacattagtaggatgtctcgggcacatgtatgttttatgtctacaaacaatctttcattgaatggttttttttttgtttcggtttggtttggttttggtttttgttgaagtaatagtaaatagtgctatgaagagaaaccatggcacacttagatattatgtttagaagctataatagaatggaaacctatctattatttattttcgtttcttccctagttgctttggcaaggacttctaatcctatgctgagtagaaatgctggaattgggcgtccttccttttgctagacttgggttttcctctgagtgtattgttagcagagggctggctccctttattgtgttggactcttccattcccgctaaatgcctgacctgcaagagtttcaacttaagagaatatttttgataccttttccatgtgtaataaggcaacatgaactgtatggctgtgtccctccattctttgctgtagtgcagcatgttattgatttgcatatgtcgtgccatccttgcattccagagagttcatcaggatgattatcactttaggatactgctcaagttcactgggagtgtttgattggggatttttgcagctgttaatcaagaacattggcgtgtaattttcttttctcatatgtctgtcaaaatattttatatgtgttagggggatgtgttaaacctcctcggaggaagggggagagaacagataatccaggaaaggaagcagaggggaagaaagggagnnnnnnnnnnnnnnnnnnnngggggggaaggagacaaaatggcctgagtgtctaagtcgaacctaccttggtaacatcgttttcctgtaatgttctttaaacatgtaagtaaaaaaataactgcaaaaatgtcactctgaaaacatgttgcaattttattgtcaaagcacagtaaaatatattactaggagacttcactgtagcgttctcttcaaacctttcttttttgcctgttttttttttttttttggcatggtttgcagacttgaatgttgttctaggacagaacattttagaagtgcaggatatcaagtaacatgtcagaactgtgcattgcataatctgggccatgttggtgtaggaaggcatgcggagacttcttgttgtgagacgggtttcatgcgcagcagggcctgatttttttaatgggctgactccagaccacattcgcttatttcccacgctgtagtcctctggttcccaacacttatacagaggtcagaatgacatgtcatggctctagatataaactccatagtctggagcgcctgacacttggcatatgagagatactagtcctctttttttaattaaaaaatacattcatttgatgtcttagtgtttactttttaaaatattttatcttgaaattggactcataaaacattgcaagaattgtataaataatttccattcacatttccccagattttacacacattaacatttaaccactttttcatcattgtgtgtatctcttattttgaaatgtttaataaaacaaaaagcccacccacaaaacctggaatccattctgtgttggctgacagctgcagaacatggggcctgccctgcagtgaggttggtacaccctgtgcaggcattggagaaaccgaggcccctttcccagcaggtgtcagttgccaatagcttctgagtgagtgaggggtgggctttgtacccacttcctgttttccatgctggggtttgtctgggttgaacctgtacaggtcttttgcaagctgcatatgtttcttaaaaataacagcattctcaaaataagaaattcaacactgccagacatggtagctgtagtggctattcctggttgtcaacttgacaatatttggaatgaactacaatccggaattggaaggctcaccagtgacccttatctggaggcttggagatccttatctgtatcttggtttgaagatcttgagccatagtggctatggattccagaagattgaatctccgagtttaaggaacacacctttaatctgggctatgcctttcatctgggattaaagggtgtggtggaacacacctttaatctgggctacaccttctgctggagacaatataaggacattggaagaagggagtctagctcttgctcttgctcctttgcctgcttgctgcgtgagactgagtaactgctagatccttggacttccattcacagctgcgactgaatcattgttgggaattgggctgccaactgtaagtcatcaataaattcctttactatctagagactgtccgtaagttctgtgactctagagaaccctgactaatacactctgtaaaacaggctagctcaaattcagaggtccacctacttctgcgtccttaattctgggattaaaggcttatagtagcacctcatggctaaagtagattttggttttatttcttcgatttggattggttttgagaaagagagtttccctattttacaggtttccctgttccacactttaacctgtagatcagtatgggccctataggtccacatccctctgcctgcagggtgctgggattaaagttatgtgcaacccatcccagctctgctttaattataaaacagatccttagtcaataggcttcactggttaataattagctacttagataaagctagccttgaactcactgagcccaatctacctttgcctnnnnnnnnnnnnnnnnnnnntccttatctgtatcttggtttgaagatcttgagcctagtggctatggcattccagcaagattgaatctccgagtttaaggaacacacctttaatctgggctatgcctttcatctgggattaaaggtgtggtggaacacacctttaatctgggctacaccttctgctggagacaatataaggacattgtaagaagggagtctagctcttgctcttgctccttcgcctgcttgctgcgtgagactgagtaactgctagatccttggacttccattcacagctgcgactgaacaattgttgggaattgggctgccgactgtaagtcaccaataaattcctttactatctagagactatccataagttctgtgactctagagaaccctgactaatacagtagcccacattttaattccagtacctgggaggcagaggcaggcagatctttgtgagtttagggatgcctggtctacatagttagttctggaacagccagggctttgtggagagactcggtctcaaaaagcagaaggagggagggagggagggatagagggacgcaggcaagaagaaatttaacacaaatttcaaaaatatatattgttctgtatgtatgttctaatatttaattgttttcatttgcccacagattctttcccaaaacaaagcaacagaccccacccccccccaaaaaaaaaaaccatgtgtttttgagaggagctagagagatgactcagtggttcagagcatttactcattttgcagaagacctaggcttgagtcccagtacccactggtaactcacaaccttctgtaactctagtttgagggaacctaataccgtcttctgacttgcgggagtcccaggcacatacatgggtacacacacatacatgcaggcaaaacactcatacaatgtacatcattcatacatacatacatacatacatattcatacaatgtaaataaataaatctaaattaaaaaaaaattctcgggctggagagatggctcagtggttaacagcactgactgctcttccagaggtcttgagttcaaatcccagcaaccacatggtggctcgcatccatctgtaatgagattcagtgccctcttctggtgtgtctgaagatagtgaccgtgttctcatataaataaactaagtaaatattttaaaaaatgtattttaaaagattctccttgcccccacagtatgggatccagaacccagagtcacatgctagagttactgggcctctgttttgttctttaatcagaaacagacccttgctgtttgtctcttatggctctcaaaattaaaggacactgaagcatttggatttctgtcttccctcaagagcagattggctctactgaggtcctgtggacactcatgacgctagcttgtcctagtcttggtggtaatgttggcttccaacacttccttaaaatgatagcaagttatatttgataagcatttttttagtattttcttgagttttaattctttaattcttgagtcctggagttcttaataagatcctatacttctttgggcaacttctagactgtcttatcttagatgtgttagcatcttatggcagttttgatggggttcttctgttatcgaatgtgtcctgtcctctgacagtgtggtaacaggactctgtattttgcccccactctctcttcatagtcagcacggtcacacatgtagaagactggtacacagcacagttacacatgtagaagacttcacagcacagttacacatatgtagaagactggcacacaatacttcatacatagtatttggctgcctggtggatggtgggttagttgttaatgaatgagtgatttattgttttcaaacctgtccgtttattagttttatttggggttttgtacattttaaagaaaccttttacccacttggtaactttatatacttttgggtgtagttctttaagatggttttcatagccttaatatcattttttcaatattttattagatattttcttcatttacatttcaaatgctatccctaaaagtcccctatacctgccctgctccccaacccacccactcccacttcttgaccctggcgttcccctgtactggggcatataaagtttgcaataccaaggggcctctcttcccagtgatggctgactaggccatcttctgctacatatgcagctagagacatgagctctgggggggggtactggttagttcatattattgttccacttaattatcattttgtttgcgttgtcagatctgttttgtctatgtgcatgtctgtgtggcatgtgcagagtccagaagagggtgtcagatgccttggaactggagtgacagacagttgtgagctgccactgggtgctaggaattgaacaaggagcctccggaagagcaatcaggctcttaaccactgtgccatctcgccataaacttgctgtgttttagtggcctacaatgtgccaccagtgaaattgttctgacagtaatagtttttatcattcctcttattttgtttttattatattacttcaaaactttaaagggtttcttttttcttttttttttttggagggggggtggtagtggtggtggtctgtattgtttatagaactaggattatagagaccaaatacccagtgttatgagccagcctagaccacacttgtggccacgctagacctggcattttgagagtcctgagtcccagtccttgtcccctttgtctttcacgttgtaatgttgtcgttctcagatgtcactgtgaagaggcgctgtctcctgtttccttgctctaccaggtcgattttattcggctcgctaatgacaccgtgatacgttgaggctttgctttttacttttgttttaaagagaacatttaggattacagtaaaattgaacagaatttatagaggattcccatatacctcctgtccttttcaatcctctctgctgtctacatgctattccagagtggagcacttgatcaacacatgaacccgtgctgacaaagcaccaaagcctgcatagggttaaggctctttgaatttgggcagatgtgtaatgaacagtattcatgatgaagtcttgctgctttgccttttcaacattgccttccctcacaactgtgatctgtttgtagactgtagttgcccttcctagaagttcatctacctgaaatcatagcatatacttatgaattagctttttcctagtaatgtacacttcagttctcctgtgacttcccagtagcccatttctgtctagcaccgagttgcctgtggaaagataccttatgactaaaagtgccgtaagcgtttatgtgttctcagtgcccatgggcacgtttcaaggcacacgatgggtagtgttgtaagagactgctcctctgccttctgaggcagctgtaccattgtggagttccttcaagcagagtgagagtcctgctgccttctgtcctcacccaaatgtagcatctttggttggatagcagttcctctactaagcctgtagtgctacctggtttcaactcgaacttctgtaacaccatgcagtgtagagtactgtctgggtgctcatctgctgtctgtatgtatctttggtgaggtgttcgttcggatctttgcccatttttgctctacccatttgtttcttattcatgctctcttagcgacagctctacccaccagcccgccccagaaccatgcagtggagacgcacagaaggcttggagggtagaaaggatgatttgtttttccaaagaaaaacgtctttcttctgtttctctccttttgcctttgtctttcagttatacctgccgccacttgcggagatatgtttatgtgttggacagattgtattccccccgctctccctgttccgcacgtcagcgttgcttctcggcccccagtgacaatggagaggaactcttgtctctaacttgctctcacattctcagatcctatgcctccaggttattaacctctgctgtccatttactgcatgctgcatgtcgtgtggcctggtaattgcatgctttaatgggacacatatgaattgaaaaaggtgaagtgttatgtttaagatactagcaagtaatcaatccctgcaacgttttcttacaaaggtcttcttaagtttatgtcctgggagaggaggcagctttccaccaggacagacactgtatactctgaattctgctcccttccagatcttttctttgacttgcgtttgttgcggtgctttgtctgatgggtgtctgagctgtgtgctgcttttcttggtgtacagcacacctgagagcccactgcaggactccacccatctcctatggctgcactcagttgaacggccttgactctctaggatggtagaaatgactcctttagactctatggtcattactcatttactactgagaagttaaaaagccaggctgcaccaagttttaggcaagcgtaaattaaacagagagaaggtagatgtgtaaagacgcaggtggggtatctcccaggtcagtgaggatccgcagctgctgaccgtgcatggtgccaaaatggagggcaatataacatgactgcatttcctgtaagtcagaaatgacttgtgcctccatactctagctggagaaggtgatttaaggcagtgtcttcactgccaagcgttttaaaggagaagggaaaactccatggcaaccttaaacacaaaatggcaaacatctgcctctcggttgacctttgcccatgaaggagcatcagaagctctgaactgtacatggtgtctcggtgaaagcactttattagggaaggaaaaccgtgtggctctagtggctggtttttgtagtaaagctcttacagactcatggtgacagtgtgctatagactctttggtggggggagtaaaaacaaaataaaataggctcttcgcttcctaatatctgagaacttagcacacaagccaggtgtaattgcggtgctcaggaggctgcagtcatagaatcgcacgttcaggacgagacagctagctacactatgagacccaatctcccaaacagaaagaatttaccaaagtaaaagccactggcttggttggaggatttggagacagagcttgtctgattgtgcataatggggagagttgctgttcatcattgaacccccaagttgtctgataattgaccttgcttctactgacaaagaagtatatcatgtggcagggctctctgcaaactgatgagatgggtgggggagatgatattaaggaacagatggctctatgattgtagcagccaggatatttgtaaggtaggttaacaggctggccattcaggcaggcactgataatgcagccctgtgttccaaatccacaggcaggtgcttcttgtagtctggaagcagagctccttcttgcttgcgagacataatgattggttacatgaaccttgtcatatatagtcaagctactctcttgaagtcagcagagcttgtgtgtccagcttatctacaaataccttcacagcaacatctagtgttttaaacaagcaaaccccttagccaagctgaacttagaggtaaccatcatactgtattctggttttctttgcatatgctgaatttgtcctatcaccctgcaagcccctgaagtgaatatttaatcttattcatcgtcatcatcttccaccctatggtttatagcacctcgaacatcgctaaccctcactaatatcattggcagcagtgtcctaccctcagccacttgtgaaactgtgtacttgccattgggttacatgtcctgatctgctggagcagagagaaatagacaaaagaaagggaagggagtggaccacccggggaagatactgagggaaggatgaggggcgagaacaaaggggcaagcgggcgggcgggaggagagggagccttgctgtagagcagattgcttcctcagcctgagctctggcagctagctgtctccacgtgcaattcggaatacaattctgggtctactttcaacttccctcactccccaccttcaccttgccgacctctcctccctctcacattttgctttcttctcaagtaaggtttaagatgtcagctactgaagggtattttgatttccactacaaaacctccctgaggttcatgcaggccgatcatgtatctgtaatgaactgccaggcctggtcagcctaggttggtgcctgaggaaacactgtggggtcggaatgcttcctagtgcttggaaacatgttttgactgttgtccaagagtttccacctccctatcccattcctggactggttaccagatgtactgccctgggcctcggggcctgccaggccacgccagtgtgacagctcggggacatggagctcaggcctctcctgcggcaactctcatccccagcctcacccctgcagggtagactagggcaggcctgtggatgagatgcgcgtgtaagagaaggtcctggtcaccctgtcatgccacgctagtttgcaagcggctgacgtcctgtatctgcagtgacacatgctcaagcatagcctagccccagtggtagagccgttcactcaacagtgacactaaaggacggacagagccagagtcggaacagagcagtcacagacactcacagaaccaagtggcactgttgtgtacagcgtgcttcctgtacagttagttcctagagagtgtgatagtgtaagtgtgtgtgtgtgtgtgtgtgtgtgtgtgtgtgtgtgtgttcaagaggaggctaatgcagtctgaaggacatactgctgtgaggactgatggagcacgggcacgtcactgacgtctcttcccagtgtcagagttctgtgaactcagagggaccgcctgggctgttcctcaaggaggagggagggctctgctgctgggctagaaagatgctaggcctgcctgccagtgatccccaccagtccttgccctgtgcttgagagagacacacagatgtgtggagccctcggcacaccggacacctttgggattctgaaaccacgagccctcctctgctcacacaccgtgcgtgggtcctttaagcatcttctactagcgggagtttgtcgagtcttcttgccttcctggtcagggtctgttgggtagcactcgtagaccttggtatccaagaccgagttccttatcgcagttgctgtgctttgctattgtgcctttatttgtggacttatcatttcctgccagagtcaattttttgaaaataggaatgatttggtttgtatataattctcagatcctttccatgaacacatctctctcgataagtatatttgtctgattgtaattgcagggccctgtattatccaaatattctaataacttaatgtgtggtgacagggtctttttagggggaggacatagttcaccaagctttgtgcctcccacatctggaaactcctccactcccaaccctgggaatccttggatcacttttcacgctcccagccctagatgtcacttgtgttgaaactggattgagaatttttagtaactgggaatttgaatgcattgttagtaactacacaaagtaaagttaactatatatgtatgtatgtatgtatgtatgtatgtgtcaaatatataactgtgtactactgtttcagttgcggcagaggcagtgagtcgtcggaggcgttgtatgctgaggttctttgttgtaaggacagttgactttgagttctgctaaattttatggtgcttgattctaaggtgctgagaagaaaacaggaatggtgaaaataatttcttttgtcactttggcttttaaatttggggttcccattaagcatgttaaacaaagtggcattgacttctgtctccaggtagtacgttcttggctatgagcactaatcatgaacttctgggagtcatagaactcttctagactctatcaggaattgtggatgttatgttatgtggcaggaaaaaaacacctctgaatgtagggttttttttttttaatggagctgatgtagtttaaaatttttatgtatagctagaaaacagagcccccacccccaacagtagattagacaagacattagcagcttacttactgtgtaaaagcctgagcaggggtggcagctgtgccccataaacactttacactcagagtccacctgccgtgtcccccagacgcctagagtcttcagcctcatctagagtctgggatagctcactatagagtgtgcacagcacacagtacgagatggaaggaaatggcatcagatggaaattgctgtttttaaggtactctcactcatctgagcagaggttagtcacaagtagccaacctgcgcgaagcacttaaaattgagcctttagcagaatggccatgtgctggggtagaagtaagctgttctgggctcctgaccaccccagtgctgctactgcaggggaaaatcacaggtgcctccccagctatcgatgtttgtggtccaagataagacaggattattggcttaaaaaatcctctgctttggactgtttctttcatagaaaacactaagtaaaaaggaggtaccttctgagaggccctgaggcacaaggtgtgaagtaagaattgatggtaaagcttcattagaacaggtcagagaactcgggtttcagaggccacttacagaggcacatggtgcatctgaggcagtgagcgttgtcttctgtcagagcagaccgacatgggattgctcggggattttgttgtttttctccagacaggtttctcctctaactcactgtgtagcttcaatcctcctgcctcagcctcctttatactgtgcccaggtatatagtattgtatccaggtaagtgtagtgttgtctgaagtatgatgctccaggcttgaagtgcttgcgtttgcttagtttgctcctttggtgtctctttatactgtggtttttaaaaagtcacatctggtgccctttttttctctttcaaatatctacatcttcatctggaatctaagacagtttctaaaaagagtttcctcaaatgagctttctaaaacttctagaccaatcttgtcttagtgtacccctcacaaaatctgtaatgtataataagtatttgaagccatagcaataatttttcatgcatcggatactgtcttaataattctgttgtggccgtatgccttattgatttctgtgccgctggtgtggtatgaaatgaaatgtatcttcccacttaaaccatcatggtttccttttgaattacatcctcggcacttgatcttctcatcaggctgcttacccctgtgctctgagatgctctgctcagccgtgcggactttaccgcttgtgctctgtggaacataaatcaataccagacaagtcagtccacattagaaacgtcagaaagaaaacacagttaagccgttaattgttagaaatcacctaccatagggtgtattctgcttcagtttactgtcttcccctcaagactgactggtgtcctggagacagagtgcagatcctgagacattgggccacgcctgcactggtgctgtggccagatctaggtcttggctcccatgccttttgccatttcttttcaagactttttgttgtaaatgttagaattgcttaaggtctctcttcaggtgttctctactcccctcaccctgctcccacgagacagctgtgtcgtgctgtttgagaggggctggtgcaggccaggctgacctcatggaaactcacttttctagccaaggatgaggttgaactgctgagtctcggccgtcaccttctgcgtgctgggcctggtttatgcagaggtagtcggtgaatccaggcttctccaatgttagcaagtgctctaccaactgagctacggccccagtctcaatagactgttgtcgagggcaagagggtgtgtgtgtgtgagggggtgcatttgggtcttgcatgtgccaggtgagtgctgttttgcttactcagacctatgtctgtgtttagtcactgatcccaggcaccagctgtgagagttggctacttgatagaagaaaccttgtatttgctgagaatgaacgattttaggttcctgaaagttgattcgttttctaatcaccacttcctcaaagattatcttgtctagttatgaaaaggtagttgtcttattgtatcactgtgacatctttagggtgcacctgaggatcagtggatggtcggataatcaatctctctctgtttcttgctctctctctctctcgccctctctctctctctcagagagagaaacagagacagagagatttttaaaagatgaagaaaagccacatgatgagggtcttaagttcttctggaatatgtaagttatgtaagttgcagacttttctccagtaaaagattttacaaattgtccacttattaaggctctggtaagccatggccgtggaggtgatgtcaacacactttgaaagactccttctaaaaacatgtgctctgtagctccaggaagcagaagagcacagagagaaggggaattatcttaaattagctttgtgtcattaaattaaacatagcactaagaaataatttctaaacaggatcacttagggaagaaagggtttactcagcttccacagcactgttcatcatccaaggaagtcaggacaggaacccacacagggcaggaacctggcggcaggagctgatgcagaggccatggagggtgctgctcactgccttgcctcccatggcttactctgtctgctctcccccatcagtccctaattaagaaaatgcctaacaggcttgtgtaaagcctgatcttatggaggcattttctcaattgaggctcactcttctcagatgactccagtttgtgccaagtagacagttacctgtatagtaaggaataaaacataccagtgtatgtgttaaaaacgttaatttatgtacgtgtgcatgtgtgtgcatgtatgttgcgtgcatgcatgtgcgcacctgtgtgtgtgtgtgtgtgtgtgtgtgtgtgagtgagcgtgcatactcatgcatatacatgtagaagccaaaggaagacattgggtgtcttccgttgcttctgttccatccctttagactgggcttctcactgaacctgaggctcgtgctttggctaggctgacctgccagggagatcctgggcctgcctttctcctcccccagtgctcagccttaccagatctctttttcttcttctttttaaatgtgattactggggattcaaactcagacccccatggtggcatagctctcactcttccccactagtcacctccccaatcctgatagaaaagctaagctcacactgtgcacagttagaagtgcttagaaagtgtcttccttacaggaaggttggtaaatttttgtgaacaccaaaattaacaacttggctcaacataaatgttataagggcccatcttggtgatcttaaaaaacaacaacaacaaccagacacccagctttactgtatacaggtgaccatccaaaggggaaaattttggagataaactaattgttaaactatagcaaaaggtgcctattaatgatatacatctttatcccatgggaagaatgaataccctgagcgttatcacccaagggaacagagttaagaaggaagggtatgaagtttccatttgccttttggtttggttttgcactatgtaaatactttatttcacgtcagccagggctccgtcccaggctgcttcataggctctcgatgggctgctggggccagtaccggtacttcttcttgtccagcttggcgtctgggaagatctcattcgagtcatcactggtcagctggtcaaagggaattgtgttcctcgttttctccagctgcttctcacactcctgggtcctgggctgaggtccagacgcaaactcagcacagctcttcacatcccccgtcccctcctgtccaccagggctgtgtgtttatcctcaggcacagagatcttcagggcattatactgcttttcaaaatcatccaccaagccaggcttggccacattggccttgtagaaagcccagtcaatcattggtggtttctcagacagactagccaacctggtgtggagggtctctttccaggactttagggcacttccaattgccttctggttttggggtatgagctccacacaagatacccaatcactggtttttagagcaagtttatgcccagccatcttgagatactccagcagagcgctgtttctccatttgctttttaaaagcagtagtctatcttttatccaccagctgctttttaggtgataatttccttggtcaaggagacaccatagccacagttgatatgttctgtgggtctgtaggtgtggtcagagttcctggacactttctcatgcaatttagactgtgcgtacagacaactggagtgcacatagagctccacatgttggatgctcttcccctgcggctgccatttgcagggaatgtcatgtgcacattcagacacgcagacttgcacaactgcttattagagaaatattcttggttactgagtgtctcacagagttaaacatacaggctttcccatatatggaagaaaagtaattccacccacttgccatgccttggcatgtcatgatgccagcccttcacatttctttgacttcccgagcttaaatagacagtgatgtaaatcagcagttaaagctgcacctaccagcccttggtgactaagccatcacacggctgaagaggaagggagagccacgtcagtttgcctgcacagtggcagtcacattcagtctaaccccagccttctgagttacagtgacaagattatttatttctaggctacaaaagatgaggaagcagagagaatccaggaagttaggatggctgggcagagatccgaaagctggcagtaaaattgcagtcttcctggggtccctgttctgatcagacttccatcttcctgactttacaatgtcacagcattgtaaagatgagcatatctcaccacgcaagtactccatgattctcaacagataacttccagtctcagggttttgagctgggtgaggtcctgcatgtctttaatcccagcactctgcaagcagaggtgggtgggtctctatgagttcaaggccagcctagccccagtcatccaggactacatggtgaaaccctgtctcagaaaataaaaccaaaagagatttaagttttcagctgttacatgtttcactgtttcctgtctgagctgaaatgatatgtagcatgtttccatgtgtgttctcagcttgagcttaaactggcgtgcatttgcatatcacagagagctgtttataagagctagctcattaaaatttaattttaaatgaaccttagctgtaccgtgtggatttttaaaggttgcacgtgatacagtgtgcccatgtgcagtgtcctcattggtaataatgctggtatttcctgatctctccaacaaatgcgactctaatgaacaattattgctttagtcttcaacataactctatgcgatgctaccttatactcctcctgtatgggtaaggcacagagtgatcatagaaactgccgcagtggaggaggcaccgatagaggtggatggctttgccctgcactgtcctggctaccatgcttgtcacagaagtctgaggcaatttcagccaacactgaagccactttcaaaccctgatttattagacattttagccatattgtatctaaagttgaacttgttgtgtacccacttacagttgagtctggatttagactctgtaaacaggaagcgctattttgttctttgaacttctgtgtagcatcctagagccagctgctcaacccagacgcctcctctccagctttgctcagcttcagctccttatgctggactggaggcgtggctggggggggggggggaccaagtctgcctcttaactttccgtagaagcttgaatattttggttctcatagtagagtgagtggttgtgagatactcatattctctatctccctaaccttttccttcctgctccccaccccatagttgctctctcttccagcactggctttttgtttggggttgatcctgttgttccccacccccacccaccactgtgctgggattgaaaccagagcctcacacatgttaggaattgctctcccactgaaccacatcctaggcctctcagatggtttaaccagattttataacataagcatgtatctagacttccaaggtagcccaaaggataagtcctactgttacctactactgggagtcagcaactgaacatgatttggaatggtggctgacaggtctgatttccttgtcattcccctgtttggtgactgagtgactttaagtaaacagacagatgtggctttcctggggatttggtggtgtctttaatgatccccgaaagtccatcctgtacagatagctacaatgatgcttagtgtcatttctgcaaaatgtcagatagtaagagaaaaattagtatattaatctagaatctgaataaagagctgcagaaaaatatatctctacatactcagtttaaaggaaatgaggtctggggaggacttactatcgtttagtttaaaggagatgaggtctggggaggacttactatcgtttagtttaaaggaaatgaggtctggggaggatttactatcgtttagctaagtgtaccaaagcttctggagtttttccttaggatccaccagccatcgtctcagagatagatcatcacagtgcattaaatgctcactgctgtaccgcaaggggccttcgcctgtcctgtggtgcttccacatcttactcagcactgtatcactgaacatacaatgcaggctgtagaagcaatgtgctatgactgtattgaagagaagaactcccgtcttccttagctttaaaatagtctttctgaagagttactttctgtgcctagcaccaagcagcaaatgcaagagatatcccagctaccagattctgtttaacacatgtgtggctgtggcaagaatcatcagcatttcccattgtgtggttgtttagagagatcttacttcatgctcagccttcccttcctcttgtgaatgtagcactgggaagagcgagctgtctgtacccatgaagaccctgtgctcttgctgaactgctctgctgaaactctgcagtccaagctgaaaggcctccactcccagtttcttgccggaatgcacaccggcctatgccctttgtgttgtccagtcttggtctcctactgctctacctgcccacatgctaggtaggtattatgtctaggcttagctcagtgcttcatagaaaatacaggtcattcggtttttaatgtactttggatcaagatgatgagcgcagtctgttactaaagctttttttgatattctttatgttatttagaagtttgcaaagcatctaaacacagacaaaaaaaaaaaaaaaacagacatctgaacccataattctaaaaataaaaaacacggtcttactatatattcccagttggcctggaattcacagtgtagactcaggtgaccttgaactcatgaaggcctgcctgcctcgtgggattatggtgtgtgctgccataccaagtttgggcctgttcttcttctgagcagacagatctgaaaggctcactcccagttctgttgtctgtgtgtcacacctcctccggacaacacgtgcctcctgtaccacgccaccttacttttttgggctaaagagacaaaactggctggaccagacaggactcactcctggatggggaacttgtacatcctgtcttttctcttttccacatggtactttatgtgaggaccattcaatgtggatttcactttcaattccttctacagtcaaatcgatggtagccttgctccatggtagtgcgagtactatcccaaagagcaagacgaactcttgccgtcattgcttacttctgccgtgtttaatgattctgtatccctggagggaaatctgttgagatacaaagtttgctgcttttcatgtatggggacctgtgctcactggagtagtgtgacttgccttcaagaatgaaagtaataagcaagcagtctttgcagtcaaataactttactcatttagaatacatggaagtgtgtcacagtcccccaaaccaaagacataaaatccaccttccccacacatgtgcataatggcacaagtagtgtagttgtcatgcagttgttcataaactggttatcagatggcattttctgaggttgtccaattaggaaaacttttttctgatgccctgtacttatagaaatacaactatttcccagaagtataattacatcccagcctactgatattgttttctttttgtttgtttgtttgtttgtttgtttgtttttgtttgattggttggttggttggttttttttctttttcaaatacttgaagaaagtttacttttcattgttttaaatgtattatttcattaaaaataactttctgaagttttcctgtttcagaaagacaaggaagaaaaattgccacaactttgaggctaactggcctaggtagtgcgttctagggtaatgctacatagcaagaccctttgtcattacaaaataaaaataaaggacttgctagtggaaatgctgaggcttcagttctttataccagaatatggtcctgatgcaaggcactggcttcctgttgtcatcttgctctcccagcttccctctgtagagcatcactgtcctgtctgccagtgagctaagaggcacagaggtgatttttagagttgaacagatgtcgtgacatgagcagggtgacaccaggactctacttcaccaactgccgtgacactcgagtgactccctctgagtgccttcagtgagtgtgatctgtcctttgacagtcaaatggctacctgtgtggctttgtctctctgtcctctttggcagcgtttggatttctgacttttacaagatccctctgcattgtgcatttgtttgatagataaaggtggagtggaaagcttattctctgtcaggttttcaggaactgacattcactctgatatgagagaatatggtagacacagcagtgagttaaagtatttcagatttgagccttaaagagttcatgtgaatggttcagttcgttaatagaacgtgtgcagagacagttgttctcaggtaggctcctgactagtgtggcttttgaacagcaattggaagacgggcactgtaggactagtaagtttgttccaagcgtggggtggtataaaagaaaatacaggcaagagtgggtgagagacacaaaggattcatttaggagaaaagagtggagggatgggacaggacatgggaagaactgagatcagacatggggatagaagagactgcagccatttgaaatggagaaaagggctgtgattcaaatatcgagagccaaagcagggaggtgaggtgggcgccctgccccccaaaagagaataacggacagttttagtatgcttcactgtttaataagaaaggccgtgggagaacaaagggggaagtgagtaataggagatgatcataagagagcaaactatgaaatggagacaggacggatctgcgcgtgagactgtccttgctccagtaggacacgtggcttccccatttcctaattactcgcacatcattaataaagcacaaaggtaagagaaaaatttaagtccttagtatcagaagtgatacattgtgctgaggagacagctgcatgctgttggaacatgcgctggtttgtacaagagcctgggctaaccgtaaagcagtgcaaaggccaaagcaaaaacaaaactgcaagcaggtatcagcagttcaccaggacgttcaggactggccctggtgctgcaggacagaagctggcgtttctgtggtgttgtgaggtcaagtcaggtgccagcgcacatatttgttctgcaaccgagaggcccgtgcaagttagcaagagagatggtgttctagcttcatctctgtggctgtgataaaagtatcccaaacaaaacaaggcatgggaggaaagcggttggttggctccattgcacaggtccaaatacaagtcccttccagcaaggacgtcaaggcaaggacacaagaatgactcgcaccacatccaagttaagagcagagaggaaagaaaggatgcttgctggctgcttgtgccagctgcctttctttactcatacaggtctgggacgagcctagggaatgctgtagcccacagtgggctgggccagttaacaaacaaggcagtccccacagacatacccatagaccaatcagatctagataattcctcagctgagactgattttcctggtgattctatgtcactatttaaaactttgcacagatggggagagtagggaagcctcgcttcctgggcatcggaactcttagcatagtacctgttacatgttaagtatgtaaatgctaatatagttattttcttgattactttaacactgaatgtctacatattggtagctcatgtgccttatttcacacccagtgccatcgagggcatcctcacttctcaaagggagacaggttttcacggtcgtcacgtgacattctcagtcacatgacagataaccgactataattctcgtgttgtaacaagagatccttaagggtgtctccattagcatggcctatttcaaacccagtttctgttctgctcctgacaaatcccatagtcactgtaagagacagcccagtaacttagccatttaattttatattctaaataagaagtgtaaaacttattagctaggagggggtattcttagcatgtaaaaatggagacatgaatttagatcttttaagatttaaataccattcagaagagatttgtgatgttatcagtgggtggatgagcgtatccttctttggccactaacatctgttcctttttcctgcaatgcctcttccctcagtctcggcatacagtatacgtcttcttcgggtctttgcttggatggcacctcctctgtgaggccatcctcaccatcccatccagatccaggccttctttctggctctgtccatctctctgtggctttgcttttataatttcctggactgtggttgtttcagaagcactctggtaattgtctacaattctgagatctgctctaaacaccagccccatggtagagtacagatttcggcttctctcctgcttcagtaaccaatccttagacatgtgagcttttctttagaattggtttgcttgtaaaatagtttattggatggtctcagtgtgggaggagttgtggctgcagccgaaagcccaggctcagctgtcttccatccaaccctggaggaaggcggcccctccccagcagacagagcagtgtgggcaaataatggcaagaaatggaaaaactctgctgttgtttttcccatggaagaggaagtttccactgctggtcttgtgttgacttggaatggaagggagagtgagtctgctttaacagtgtagctccatgtcctagtcagctctagctgcctaacaaataccacagactgagtgatatgcgtgagacaaatctccccacagggctggcgtcccgcagtgggtgctgtcttagagtgcacgcatgtggccggcctagaaaaaagcactctgttgtgtctgctaaggacactgtattagtgacaattccattgctgtgatagaataccatggccaaggcaacttaaagagccgtcactataacttacagtttcagaagggtagcatacataactgtcttagggttgctgttgctgtgatgaaacaccatggccaaagtaacttggggaggaaagagtttattcggcttatgcctccacatcatgttcatcgaaggaagtcagaacaggaactcaagcagggcaggaacttggttgcaggagctcaacctgctttcttatagaactcgggaccaccagcccagggatggcactgcccacaatgagctgggccctccccaccaatcactaattaagaaaatgccctatagacttgtgtatagcatggtcttattgacacaatttctcaactgaggctccctcttctccagtggctctagcttgtgtcaagttgacataaaactgccagcacaataatgatagtgacagagtggcaaccagggcagagagggaggggctggaagtggcaagagaccttctactgttaagacccaccccctcattccttgaagttcagtaaaattcagcaaaattggttctcctctaaacaagctcgtccatggtgtaattctgtatcctggacatgcgagtgtcctattgtgcagattcttatcataaatcagctggtccggcttatagaactgggggggggggcgcacagccaagttaagacacacttataccatgtaaatgtagtattcaacatcatagctgcggtgctcttggaaaacagtttttgcctcgagttgctcttgtaaaatcatctcagctgggctgcagagatggctcagtggttaagagagcactgactgctcttccagaggtcctaagttcaaatcccagcaaccacgtggtggctcataaccatctgtaatgggatctgatgccctcttctggtgtgtctgaagacagctacagtgtagtcatatacggaaaataaataaatctttaagaaaaaaaatcatcttagcctctactctatccttggcttttctggccagagtcagtctgtctgtctgtctgtctctctctctctctttctttctttctttctttctttctttctttctttctttctttctttcctcccttttttcttttcctcccttcctctctctctctctctctctctctctctctctctccctctccctctccctctccctctccctctccctctctctctcttccttccttccttccttccttccttccttcctgagacagtcaattaaaaataagtacaaacttgattccaagcacttctacagtggtgccgtgcctggtgagctggtcctgagcagccgtggagagcaaggctgtaagctgtttcctccatggctcttgtctctgctcctgactcaggatgggctgggattggaacacataaaccaaataaccccctttttcccccaagttgctttttgttcttgtgtttatcccagcagtaggagagaaactgaaagagcctgctttactgtaggccaccctcccttgcttgctgtaagttgacatttgctgtttactgctcagtaatcgagaaggtgcttccttcaactctgttctctgatttaaatgctttcccacaatcccttcccccagaagtaacagctaatcacctccagattcaaagtgaacatagattttaacttcatgttgaataaaaatggtgcatgattgcgataacaatttatctttcattgagaaacaaatgtttctttctcacaaagatagacttgtatattctagctgaataaatatttacttttagtctgaacagattagattttgtaatcccagacagtttgtgtctgtctaaatagtcttcttatcagactagcaataagctaccagttttccaaaaacagactacttgacaaataattacataaaatattacacaaaatattacataaaagcaacttgggatcaaatattatgtaacctatactattggctgatgaaactctatggtgtagcgcatgatacttgctccactgaaaataaagattaaccctctccaccctagtaataaacaaggaattaaaacagatttacgtttgggatcttttgcccaaagctttcatttttctacaatggtgcattagtactgggagagagtgttgtttgctgttagtgtctctctctttttttttaacctctgtaattattagtttattagtatcatccaggactcatgttcagtattcctcctcaaattacattaacaacgcaaatgtaaagaacccaagtcagaattatataacagcactccatcacaaaagcgcgtgaaattacaagaacgctattttatcttttgtttgtttgtttgttttgtttgtttgtttggttggttggttggttgttgttgattttttttaaaagaacactattttaaaacactggcactttaagagaacgataatctcaaaaaacaacccactaaactgtcaaattgttccctaaactaagcagattaaacatgattaatgaatgagtttgggttttataaagaaaaagcaaatggattggacaaatggtactaatatgcaaagtttatcctcttgtatctgattcataaagggacaaaccacagtataggaaaatataccctttattttaaatgtggcataattttaaaagctggctcaagtaattaaaaatacctttaaacagtcaagtttcctgagcaatccatatctagatagaagggcaaaggcgttacagccagcgttcttgtgatagccttcgctgggactaaggtcaacaaatagtacagcagtcttgtattttaagctcacacttttggggatacattctcaggtcttctttagtaggggaaactacaaaatataactgccattacacagtaatggcggttaaaggagagtcctcgtgtaaggattagaaggtacttttccatcagtccttcaaggacagacgttcagattgcttgatcctaatagtcccacggtgtgacaccgttgatcactccttgctttgccaagtaggttatataatatctcttatccagctatcacgatttaggagattcttcaactatggatgaaaatgttaccctaccacaatggcagggcgtgtggacaaaagcgctcttccagctaactagatgaaagataacacagtaataatctatgcgacccaaaatgggcaaagcaaaagactagcttcctctcgagaagaaaactttcagacctatgaaaaggacaacaatactaataaaaaaaaaattatatttacttagaagcattcagaatgtcaacaaaacagccgcaatttttttttcaattacagagtggtattcagttaacagaacaacaattatcttcgtataagctgcatcagagacaactgaagatgaaaaaaataaaaccaaaagggaaaaaacaaaaaactactgtccccatatataactaatttgtgctgtgtaccaacaagaacctgctttaaatttccataccaatttacaacccccagactgtaccaggcaaggttagtggctattgaaaataccaccaggacagggctatctaaagactcatttggtagtgtgttaactatacaaaaaaagacactgtacagtttaaaaacaaatcttacacagccttacatttcaatttttttctttaaaaggagtgagttgtgtacaggggggttaaatgctttatagacaagaaaaaaaacttcgctagaaccaacttattcatcatcatcttcttcatcttcgtttcctcttcctcatcctcttcatcctcctcatcatcttcctcttccttctttttcttgctcttttcaaccttgaccacccccttttttgctgcatcaggttttcctttagctctgtaggcagcaatatccttctcgtacttctccttcagcttgacagccttcttctcatagggctgcttgtctttcgctgcagtgttgatccacatctctcctagtttctttgcaacatcaccaatggataagccaggctgctcgcctttgattttggggcggtactcagaacagaacaagaaggccgaaggaggcctcttgggtgcattggggtccttgaacttctttttggtctcccctttgggcggaatgtaggttttcatttctctttcataacgagccttgccagcctttgccatatcttcaaatttccccttttctttagcagacatggtcttccacctttctgagcacttcttggagaactctgagaagttgacagaagcatccgggtgctacttcttgtgctcctcccggcaagtttgcacaaagaatgcatatgaggacattttgcctctcggcttcttaggatctcctttgcccatgtttagttgattttcctctgcgaggcacagagtcgccctgtgtccgtccggctcacgcttgccctggcgctgtctctatggagctcaatgtactgcaatggctctgttagcatctctcttgatggagagtgaatgtagtaagatgtcccttatctttcctctgaaacagggacagaaatgtgtacattgtagataaaattgtatgtgtgtgcagtacacacatgccatggcacatgtatagaaatctgaagataacatgtgagatgagagtcagtttgcttggtccttctaccatgtggattctgaggatcaaactcataaagctttggtggggatgcctctccccctgagccctgcgatactcttgatggggagttcatgaagtcccagctcttcactggtcattgtttggatggccaccttatcacctgcttttccttctcctcctagttgccttcattactgacaagaacagcaaaatgaccacattctcctacctgacttgaagacattatagggtgaccatggagccaagacaaaaactgtgatatggcttttaattaaatacttgaagcgtattaggagaagtgtaaagtgtttgctatgctgggaaatctccacttgcctccttaaactgggcaccgtccactgttggtctcattcccttgtcagtcataactaggacaggaaacagtccatctggcagatagcatgcttcaggtttttagataacaggtaatacagctcatgcactgtgttgggagtcggggtcaggtgttccatctccgagaatgttgttagtttcatttcattatgtcatctgtccgttcctcagacatgaagcaggagctgctttacacatttaagactgcaaacagagcaaactagtttctttcagtgtgttctaatgagattgcatagcaaatctgccatggctgggatcagccatagctacagagccagcagagggagcccagtacatgggtttatctctgagtcttgaagaagacagagagagagacagagagggctcaacactaagttcacttcttaaaacaggcagttgttttcctgtctacagcataaggtcagcgatgactttgtcttaaggtaaagacatttcttacatctattgatagaagcctatctttataattattgggatttatggtaatgagctgtattttaatctggttttgttttggttggttggttggatttttgtttgttttgatttgaattttatttatttttgtttgctcatttgtttgttttttgagacaagatatctctgtacagacctggctgtcctggaactcattctgtaaactagagtgatccagcctctgcctcgggattaaaggcatgtgcccccccaccacccagctgatcttcattttcttgcatggctcactaattgctaagtgcattttatcaaagactcggagacgtattcagtgtgttgttgccaatgaacgctgctgtttgagtacacaggtgttaaagggcgttttaagtgagagttgtggagaacaaaagtatgctttgctaaagtactaccgtagcggtgttttgaaggcattctgaatagaggcttgctattgcaggctttgagggataatgaggacaaggtctcacactagtgaggttgtttatgggaaacgttaattctgaatttgttctgactccattctccctttgccttccagtcttcccatccccacacattcccatcctgtctttccctctggatttttattttttagaaagttttactgaagacagtacgatgtgagttggaaattgaatgaaactgaacttccaagacttttagttaaggccagaaactgagatgtatagtttcattcaggctttggtggtattttcaggcacggagatcttacttggtggtttgtgtttggtttgcaggctatgggaaagggtctgcttctctatttcacagtgagtcacagccagggtgggtttcctgtgaacttactgtgaatagactcggtttgtgttctcagtgaaaagtatttctaaactttaactcacaggatattttacacatgaatacagtcagaagattttttttttttaagggaaacaaggaccaggaataactagcactgtggccattggtacaagagacattgcagagtaactgaggcaggaggaaaggaaagactgggcatatgtgcccttgaacatctgttcactgaagcaagtatatgtgtgcagagcaagcagaaattacaaactaattacatgcagggtcaaaggaagtcgatataaatatacaagtctttacagatcggagactttttaaaaatagtaatacagctagcagaaattggaaaagaagggatttaggaggccagcaagctaactcagtgagaaaaagccctcgtctagcaagccggcgacctgctccccggagcccaggaagagagaacggaaccagtcccacgagactgtcctctgaccgtcacacatgcacagcggcagatatgtactgtttatatacattatgtgagcaaaccacacacactaattaccaagttttaaactgagaaagaaaagaatttacaagttcaaacctctagttccaaataaaacttccttttcctgtgactctcacaaaggctagtcaagtgccaagcaaagaaatcccagagttctggttaggattcaaaacatctaaatcgtgccttcctgtaagttctgtacctggcataggtgccagtctccgtgctgttccctgctctctctgtgactgccctgggagctcccacagagtgagcactttaggtagcggctccctgaggaaatgtcttcaccttcggacctgcctgagttaccctcagctgccactccgcccatcccaggcatgctgcgaggtaatccctcttctcaggtggattttctcattagctgttatttcagatccaatcactgccatgagttagtgagctgtactataggagctttttgaaaaactggatcggtatgtgacctgctgcctataatggtttctccagatattaagaaaatgtgacagaaaaaaaaaagacaacttaaatcctataacatcagatagtctatttctgttctttgcaagatatatgtttctgatagaggaggggaagtactgtaatgatcagatatctatgctaactgtgcaccatttaaagtcttccaatacagttaagtttatatgaagtagatatatctttcaagtatgtgctacccaagaagtaggtagagatgtaagttagagttgggagtaaagatcatccttgagtttagttattcttgctaaatagcacgtcagcaaatttaatcaaaattaggaaaatttgcctttaaaagtcttttcacattacatctacttaaatatttttctcaccaagttactttaaaattaaaaaccttgaaagaaatgcacaggagtgccttcatgagagacagcaatcactgtcaaagtcactctcagttttggtaatatagttagtggatcatgtattgacagatcttgaatttttacctatttttctcaacaaactttaccagtaataattacagtaattatataacattattttaaaaattattagtcatcattctgctttgcttctgacttgtctatttgagttttagttacctgtagcttggggaaattgaattccagagagagaatttcagcatttcaaaacaaacattgtttagttatatacttgggctgaccatgtcgtgtggttagtgacgtgtgcttggtgtgtcttagcttggttgtgtgttttagagtggagtccatactgagtgctgtaactgccatgggaagtttttgctagaggtgtgtggatagcagtgggactgagttctgcagttgtacttcagggtgtgctgttgggtggggacatcacgtaatgggtattagatatgatgtcattctttgatgagagtttgatgagttactgggtcttccttgtggtgttgactgtggaatggtatattccatcccaatgggtcagatctggtcatggctgtgatgggcacatctgtcgtccatgccctgtgcagaaggaagcacacttggcgagtttctgagtcacctcctaggagcactgagcctttgcagattgttttctgacccccgtgccttcattttaacaactcgtcttagaaattaatttaaaggtgttcgttttctatgtcaccagtttatggtcacgaagacggaaatgagtaggtgggcaacgtactttgtctagcagcccctgtctataccatgtcactgttcttagcaaagatggttgctttattagatatcactttacctcaactgaaaagtgaaataagattttattcttaaggcaggaataccgttgaagtttctctcactggagtatgaaagctagaagaggaccagtcagcaaaagttgtgtggtcacagccaacgtgaagggctcggcactcacaacacgggcatgtctgtgttgcacgtacaaggtctgtggtagcttctaactaggctgtgagcagccttctaaccaaggccacacagatggagagagcaaagcttaggacaagctcctccccctgaatgccacgcccataagaggcaagggccgtcaagagaatgtttccacctccacagacttggttgtgatttctgtcttattaaagatgtttcagtccttccctccttcccacatttactgcagtcatccagcatgcacacacacacactttctctctctctctctctctctctctctctctccccctcagccctctctcttacttttggtctcatctgactgtctttgcaaaccgtgtcagaaccgtgtcttgtcagctttcctggaatgggcaggaaggctttcctgagaagtagcagcagatgctcctggacacagaagagttcttattcctgaacagacggtgttggagcgcagagcagccgctcggacactgcgtgccccagccacttagtgctgggcctgtcatcctccctggaccagccccatagaacagggtgctcactttcttaaacagttcatatagagcagctttacctcagcgctgtgctgaaataaacactgctggtgcctgtgctctacttttagttatttacgtgtgtctgtctgtctgtctgtctgtctgcaggttaatctcagtagctagccttagtgacagttacctgtacccagtgagccatcttgctgtctgggcatcctatttttgaaaacgtaaaacacaacatatgttatgttttatgttttcataagacaaagagttatgcttggtatctcacatcccgttctccttcctaaacacatagagacagattttttcccccctgaaaaaggagtccaggctgctctaagcttgctttgcattttgtgggtattctgtgggagatacgctgggaagaagtgagggtacttcagtgaaatgtgataaggttaggcttggtgtggagtgcatataatcccagcacttgggaggcagaggcaggaggactgctgtaagtttgaggccagcaaagctaagtagtgagacctagtctcataaaacaaaagcccaattgcctttttgctgcccagttttagtttctggtagttctgagattgtggccctgtgctatgaagtggaagttttatttgttttgacttcttcttcttctttttttttttttttaatttgactctttgtggaaattggtgctttctgtcctgaggactttccataaaatagttatttaataatgtccatttttctgttcatgaacacaaaattcttatgttagttagcttgtgtggaccagttcttaggtgttgtttttctgctgcattttctatgtctttagctttttgttgttgttctcaaatttatttctaaccttactattaaactcatcatttctgatactatctttccagctcctaagagttcagtttcgctcttaggtgttgtctgtatgccacctccttacaggcaagtccctcaccgggtgagtaaacgccacagcatttctttcctgtcgggtcagtggtgctctttgggaatcattggcaatgagtttctattgtagacagtagcctgaaagaaccggttggaagtttggtacccttggggcgctgactggctgatgcatcttagggtagcctggctgggctctctgagatcagttctgtagatccattcatcttaatgctgttcagtttccctgatcctaggcggatggtggggttctctgagtccttgaggcagagatcttttcaagtggctcgtgcacacgtacatatgcacacaccagtctctctggtccactgcttgttaaagagtaacaagcatctctttgcttctgccaaatacaggaaggccaggtgtgggcatggaagatctgatggatgtttaacataggaatgttcagtcaggcttgtgtatgggacctgcgcctcccagtcctaattgcctgagttctagagtatacaatcatccacttctcttaatgtccacctattccttgtctccgacttttctcatctgttgccatgatgttaaattcaggtggtatatttacaattcccacatgtatatacctgccttaaacccagactaatcagctgtctccttgaactctctgcttgcctaacaggtgggcatctcaaatatggcatacccacaggggatgtggtcttcttgaagcttctacccaaccaccttcctcgccttgctttttccagaatactctctaaacttacagtctaagagtgaatcattcaggagagagagcagaagtggagtcaccgtaatcataaaaggcttctcctggtaggagacacagttgccatcaacccagatcttagcacattcccgaggtgtacattccatgggctctgttggtagccatgacgattacttcacccactgtggaagtcagtgtggaagtgcctgaaaaacacatagaactgccaggttctcatccggctgcattacacctgagcatataaccaaaggagtgagcagtcagcacactataggcatgcctgcacacctgggtattacaggaccgtccagagtggccaagtgatcggcctaagtatccaccgacaaaggcatggagcgtgtctgcacacaacacaactgctttttcatccctccgggtcccttcccaaaagccttgccagcatttatttctctttctgatgacagtcatgctggttgggctggggtagaatatcagtaccatttgggtttgcattgctctgatggctaagggtgctgaccagttcatgtcacttgcaagaaagcagatgcacttggagatctgaatgttaaaacaaaccagatgcagactctagatttgaaagagagaaaggcatgaaaatggaatgggactatttgggaaaagtaaggaggggccatgaagggctgtgtgaggtgggaggcgtgtgccttgatgagagccatcttcattcctagatactcttttaaaaagaaatctgttttcacatcgattcagtatcctcttagccagtgtactatcaagagaaagaaattttaaaattcaaactatgaattttaaatgtgaacctgtttttttaattctattaagtcctttgctcttggcattggcgtgttttaaaaattctaatgaggggctggaatgatggctcagagctgagaaaccctggctgcccctcacagaagacgcaggtgtcactcccaggacccacacggtagctcacaagtggctgtaactccagttctggattcatgactctacatggacaggtgtgcttgacacacagacaggcaagccactcataagcataaaataaaaataagcgtttttaaaagtctatggaatctacaaaaagtgtatactacaggttcaatgtgggggtgaggaggtgttagtgtaaactattgttaaacagcaaacctaagcagagtgatcatctgtctcttggaaattgagagctttggtcacagttcatgaccctgaagtcatgaacacatgtagtatggtgttaatcagagtttattcattgtttaccagtaccagcgattgatgataagatttccatgcatataacaaagaagccaaaataatccaaagtcttttttttttttttttttttttgacaaagaaagcagaacttggaggactcccctgcctgcttgcaggtttactgtagagccagagtcaggacagtgtggtgttagtgtacagggggcttccagagcagtgggctggagctcagggataggctggcgcatatgtagccaatgcatttcagccagggccagaaggtagttcttggggaagtgatagtctttcagtgctgaagcaattaactgtctctattctcctaccctgcagaacagacagactttgactcttgcttcagagtacacccagcagtgcaaatacatcatagacctaaacacaagagtagaaatgcaaagcttacaggagaagccaaaggagaaaagctttgggggcgggggtttacagtttgtttgtttgtttgtttgtttaaagacaagacataaaaagtacaaaccattctttttagagtttagcaaattcatcatacttaatcaaattttaaaattaagatagttgtggtagtgtattccaatgtttgggagcagaggcaggcaggtctctcagagtaccatgtcagcctgatctacagagttccaggatagccagagttatgtaatgagaccctaactcgaggggaaaaaattcttataaagatatatgcatgtgtgtgtgtgtgtgtataatgtgcgtgtacatatatgtgtgtgtatatatatttatatttatatactatgtatctgataaagggcttatacccagagcacatagagaaacaaacctcttacaacttaaaaagaaaagcagctcagtttttatgggcagaaggttgtatagccgactacagggaaggtgctcttcagcgcccagaataccaaaactaaggagactgaataccaaatgtcatgaaggaattggtggctcagcagagttagaaagggccaggcagtccagcgacccctgcaggactctactcaagagacagggcaatacgtattctgcaaaagaagaatagccagtctgttagtctatgtctttttttgttgttaaagttggcattctgttcttgtggctgtcttctacctggagggcatcatcctgagtgaggtaacacattcacaaaggaactcacacaatatttactcactgataagtggatattagccccaaacctaggataccctatatataagatacaatttgctaaacacatgaaactcaagaagaatgaagactgaaatgtggacactatgcccctccttagaagtgggaacaaaacacccatggaaggagttacagagacaaagtttggagctgagatgaaaggatggaccatgtagagactgccatatccagggaaccaccccataatcagcatccaaacgctgacaccattgcataccctagcaagattttatcgaaaggacccagatgtagctgtctcttgtgagactatgctggggcctagcaaacacagaagtggatgctcacagtcagctaatggatggatcacagggcccccaatggaggagctagagaaagtacccaaggagctaaagggatatgcaaccctataggtggaacaacattatgaactaaccagtaccccggagctcttgactctagctgcatatgtatcaaaagatggcctagtcggccatcactggaaagagaggcccattggacacgcaaactttatatgccccagtacaggggaacgccagggccaaaaagggggagtgggtgnnnnnnnnnnnnnnnnnnnnnnnnnnnnnnnnnnnnnnnnnnnnnnnnnnnnnnnnnnnnnnnnnnnnnnnnnnnnnnnnnnnnnnnnnnnnnnnnnnnnnnnnnnnnnnnnnnnnnnnnnnnnnnnnnnnnnnnnnnnnnnnnnnnnnnnnnnnnnnnnnnnnnnnnnnnnnnnnnnnnnnnnnnnnnnnnnnnnnnnnnnnnnnnnnnnnnnnnnnnnnnnnnnnnnnnnnnnnnnnnnnnnnnnnnnnnnnnnnnnnnnnnnnnnnnnnnnnnnnnnnnnnnnnnnnnnnnnnnnnnnnnnnnnnnnnnnnnnnnnnnnnnnnnnnnncattggaaatgtaaatgagctaaatacctaataaaaaatggaaaaaatggaaaaaaaaaaaaaaaaagaagaagaagaagaatagctcgaccctggaagcaagtagggagtaggaaacttgaggtctgtccatctaggagactcttgggcattacggcgggatgaattatgagagctcagaccatggacagatttgcaaagcactgtgctgagtgagaaaggcagactcggggccagcatatggtctggtctattcgtgtgagagtctaggagaggcaaaagcagtatccatagttgctagccggaagctgggtacgttgcagaaagagcccagctgtgaaaggccccatggagctttctggagaagtagcactgttatgtctcttgattattctgatgggtaatgtgcatggttatgtttttcaaaatccttgtgttataataataaagctatttgaaagcgaggtaggacataagtgcagatttgagtaccctgtgagcagaagaggaatgtttgtcagaggcagggagggagacatcccttccagaggggtgggaaggctggtgctggagctacgccttagggcatgcatagacctctgccaccctgctcctgcctcttattcccactgtaagtgagaaggccaatgttggtttcttccttagagcaagcccaccgtcttggttgcatttttacccatttgacaccctttcacgtccctgcaatgatgaagtgaagcgggcagctgcctttgcttgcttgtggttttactcttagctgttctcagagctctgtcctgagtgtcattgctcacatagcgttcatgcactgtcatgtgggtgatcacctccacttctgggcttgctcctggtgtaggttgtccccacctctccccacaccaattcccctcactgtcttttgaacactaccatctgtttttttctgcctccagtggtcttcctgagcagcttgcctgaggagctgggggttttgggaggggcatcctggcagaattgttaggcatacagattcaggaaccaacatgcccgtgcttgactcctgactcttactgctcactgctatgtacctagggagacgacttaacctacccttgcttccatgtgtcatccctttaaaaatggagggaggggacatgggtcgcagtcaggcccacctttcccactctgtgatgggtggtgctggtacagggcctgcactgcccctcccacgtctgctgcccttgctaatttctttttcctcccaagtctccctgttcataactattcatcagccagggatctctggaaagccccaattacctgggctcctttctttcagtctctgcgttgtctttgccttccacatggctcctgtcagcttccactccagtctccctcttacgaagttgcatgttcccttagggttggccatttctgcttctgttctcttgtctttcccctccaggggaaaggaatctttctaaggtgacagaggttaatgattccttggtcagtcagtggttttcaggtttccattctgtatcatgggatttcacgacggggacactggccaccataaaggggaaggggacgcataagggaaagctgctgcccactcactaccagacacagttcttcacttccgtctcttactatagtcctgctggcatggacatctctaggtctcagggtgagatccacgctctgtgttcaatcataagaggttgacacacacccagcactttccacggtgggctctgctgcctctgccctattgctggcttctccaccttcactaggatttctttgtttgccatcctgctgcctggcttgcgaggccagctcttagttgttaggttgttaaggcagcagtcagacatccccctttcctgttctcccttgctgctgccctcgctagcttcctctcttgccccatctcaccccatagattttctccagtctcgctctgtaagctgcacggcctctcagtataccttctgtatcctgtttcagcctttcagatctctttatccccattgacttcccagttagccaactgctcacttgaaggctacagccaagcccgatttcctctgcggaatgtacctaaccttccgctgctgcgcccctagagcattctggcagagtgttctctgctttcaaaacttaccccttggacttgacctctttgggcgggaaccacgtctctgagcattgtgcagtagctcctcaactgcctagaacaaagcccagggtattgtgtgtgccatgggcgtcccttcacagtctatcttcagactgtcttcattctggtcgcctctcctgccatctgtgcacctcagctgcagccatttgcaccagcttgggatcttctcagcacacccccgtttggactgaccccgcacagcttttatttacatgctgcctaaccagtgcagtgctgtctcttggcaggggctctggttttctcgggatggtatattccttcttataagacctcttttaagtgtatagtgttccagcccctccacccgaagagcatagtaatcccctctgtacgcatccagtgttaccagaagaatgtgtgtgtgtgtgtgtgtgtgtgcgcgcgcgcacatgcacactcggcatgtgtgatgagagagaagagagacctgtgttttagtcatttccagtttctcaccgaatggccagtttatgatggatattgttatacttaaggaaaagctaatctttctctagctttaaaagggcacctctggtgttaggcccctctgactgcacacgagtcaccgaggatcagcctctgggattccctttgtgatcggcttttccttcgcgtgtagccatcctgcatctcctctgctttacctagcatggagccgaggctgagcccttggcgcgcagagcttaaacagaagttacttttcgcactctgcaatttgcaagtcattctcctataaatttaggtcattttgccttaaaaatgctaaatgaaaaccaaaattagaatgttaaaaaaagcgcacacaagattttgcaagcagtagctctagtgtgggggggagcctgttaaatcataagagaataacaactttgagtgagtgtgaattctgtgtctcattcatgatagaactggaagagacctcacgttatctgttcttgcatgaactttcttaaagctggaaaccataagcacagcttcttggggaagtatgtgtgcttctggactcggtaccctcagccagtagaccttccctcgtgctcaacggaagcaccttctgttgggattgcagctcattcccttgtttggtctcctaacaagggaaacagattgctagtattctcttgtaaagtaaacaaacaaactggcctatcgtttccaaaggaaaccatttcaagtgattttccacagagcgaagaggatgcgaattcggacatgcactggtttgtaagctgagagagcagccctgcattcctgagctgcaacttcaacaagaaagcatgctttcttcctcttgacccctcctcttgcaccaagctcctctaaggcctctccattgttgttccctttaggggtgtcaagtttatgcctctgagctgtgccatgcttgttgtgtgctagaattgactgtcacacttcttttagtctcaataaccccgggctgggaagatgggtcagtcagtggtgtggttgccttgcaagagcaggaaccacattaaagagccaagaatgttagttaaaatttaaggctgggagtgcagtcctgtggtagaatgattacctagcatgcataagtctctggttttaatgccaagtactcagaccatagagaagaacataggagagggaaatctaaaagtgaaaagcagtttaagactagcttagtagtggaacatgtgtccagtctatgtggacctttaggtcaatccccagtgttgccaaaaacaaaaatgaaaaaggatagacaaaaaaagtccttgctgagacgaaaggatggacagagactgccatacccggggatccatcccataatcagcctccaaacgctgacaccattgcatacactagcaagattttgctgaaaggactcagatatagctgtctcttgtgagactatgctggggcctagcaaacacataagtggatgctcacagtcagctattggatggatcacagggcccccaatggaggagctagagaaattacccaaggatctaaagagatctgcaaccctgtaggtggaacaacaatatgaactaaccagtaccccctggagctcgtgtctctagctgcatatgtatcagaagagggcctagtcggccatcactggaaagagaggcccattggtcttgcaaactttatatgactcagtacaggggaacgccggggccaagaaatgggagtgggtggataggggagtgggggggggggctatgggggacttttgggatagctttggaaatgtaaatgaagaaaatacctaataaatttttttaaaaagtcctcatctataaagaatgtttattggtctcagcttcttgagttatcccgctttatccatctgaaataataagggcctttccaaaattgatattcaaatcaacattctatttataagatcatcactaaggaataataaaaccatagttttagcatttaaaaaatactacagatcatcccttgagttgagatggaaagtctatagaaccagaatgcctttgtcctaagcgttcctctaacccgagagtgtgtgttcacaggcgacagtaggtttactgttagggcataggactacacacatttactactagagcatatatgtgtacgcataaaattctctctgtggtcctagtgctagacatacacattttgaatcatgtcttcttaatgaattgactttcactgctacaaaatctttctcttcatctctaatagtaatgctcttctcattcagtcttctctgtctgtagctaagatggccacccaactttcttagttataaactcctatctgtttttagatttgtaagtgtttcttttaaatagctcatagttgggtcttgacatttatctagtcctaaaaaaaaaaaaaagtaaagaagagaagagaacaggaaaaaaaagcactgtcatttgattggagcatttaacacatttatgtttaattttaatcacctttattctttgaaaatctttcacatatctttattaagatagatgcctcttaggtcatagaatccctattctgaacttttcctaactgaccattcaagacctcacctgccacctggaacagggatttttctctgccggcccactggatcatctgtagttctcactctactatacgtttcacttatataaatctgttcactgtgtagcccctccacagttctctgtacgtgttatggctcttgctctcacgggtacagctcagtgcttgtccaggcactcagatttctagacctttcttgcagtttcttccctctcacgtagaactcttcacgttcaggtgatggctttcccaaattctcatctgtcttcccagtgggtcagtgtgccctgcttcttctgtcctacttttctgaactgtagtctaggttagaccattccttagagagaacctcgccattgctgactgttcatgtttgtctcactttaggaatcctaatcttatatttcataagtctcttctatgttttacttgattactacagggaagttcatctgttaccaattagcctgtcatgaccagaagttagttgtgtgtgtgtgtgtgtgtgtgtgtgtgtgtgtgtgtgtgtgtgtgaatatatccttaaaatcacccttgctccaaattaattagttaattaattaaaaataaaatcacctttcttgagaaatgtcttcttgcatacctgtggtcctgtaacactggagaactaggctgggcaacacacttccttgaagagtaggcagcgaagggccacctacctaagcatccagaggggcttacaccaagtctgtcatctgctagtccacttcctgtcctagattttctcctctctgttgttttttcactgtactgatcttttgagaatttttcccgtgtttaagatctaactttagcctgggaagctttccagtgagacccttcttatttaaccaccccacccccgcccccacccaccccccggtactcgattttgctctgtacattaatgctattgatctactgttgacataggcatgaaaggattatcaatatgctttgggcagtgcttggtcactgactagccggttgcttttgcaacagcctccttaataaatctgctttgctcctgacattgctgtcacagagatttcagaatcattactgtgctatgagactgttagtccttgttaggcctagaggaggagggctgggtttcttggtgtaattggcttttccttatgtttttcagtttgttttctttgctgtctaaaaaacacaacaaggtcctggagcaagccacgcagtccttgagaggtcccctgagctccagcgatgtccctctcccagattatgtgagtagctgccctgtcctggtcaccaggtcctctgtgctgttagatccttgagtcactgaactttgccaagtctgtccatgtctaagcacccctagacatcttcagggaaggagctgaagaagatgaacctcaagtggtggttattgatagtcaggaatcctagtagttgaaccaaacaaacaaaaacacctcccaaaccaatgacactcaacagaaaagccgtccaaggctgtgtaaagagtgcctgccttgcaaggtgctagtgggggcttgagctgggtccatctgcacccgcttcatccttagccagtattactgaatcgtgcattagtgctgtgtagttatttattccacaaaatgtgttgaattcatggagttttaaagtcctcctaatagtttcttccattaatcagagtacaacattggcgtttctaagaggaagtggtcatatttaatgccaatcatgagtatgactgtaatggtagaacccattttgtgatacacgtttgaattctctgttgaacctctcagttcttactgacttagtgggtttcttcatccataaactttgcagcaagtcctgagcccctggtccctaggatcaccagggaacgctcgctatgacctgtccctgcagctctcgacctaacactgagcacatgaggctgcaacccacaccctctctgccagtcttgctgcctttgcccagagctaacagagcaggagtgactggagttgaatcactacctgtgccaaggatccaataggtgatttgagagcacagtagcgggcctgaagtgtggcccagcagggaaagagtctgctgcgcaagcctgaggacctgagttcgatcccccagcacctagtaaaagtggaaggagaaaaggagttccatagaatagtcccctggcctccgtgggcatactgtggtgtgctcatccccacacatgcatcacacacagtaacagtgaagagagcaaacctgttagcaagggaacggggatgctctccttttgtaattcctcagccgtttaactggttgagtatccttggcaagagccacagatttctgtgtcctggactcaccccagacggcttgcccgcagagctgggaaaggaggaggagagggtctccacagctctggaggtccagatgtgtgctttctgcaccagattggagaccatattagcagagttttaataagtgcttaaaaataagcctatgttttccttcttgcactaacacatagaacactcagggtctgcgtagaggtttctcagtttattaagaaaatgtttatactcattacactgtataatttacaagtcagttgagtaacaacgtaaaaagaacatggcaagttacaaaaatattagtgttagtatttaagtccaaccatgtttgtctgaacacctcacgggaaacccttccatcgcattttagataatgaggaaactgccctggctgttgaagggaaaataatacaaaaaatggtgctcttatcctctgcagagtgcaccctgggggcagtggaggtggaggaagggcagctactgctctgtggcttgcatggctggcatgtgagtgtgcacgctcatgcgcatgtgtctctatgtgaggctttcacaatttacctcagtgagtgggttgatagaggagttttggatggctttttaaaacacttcgggacattcagacaacttactcatgtatagcagagcctaaatatagaaagtgatagcaaatacgttgtagttacttttaactataaccatgtttttaaaattattgatactgttagtgtcacagaggtgatttccttggctctgctaatcaccttagcaactgttagaagcgagaaaactctaaattgcactctgggaagaaccacagaaagtgtgctcgctggttttgttctttcagagagctttgaatcttctgtctgccaaatatgtcatctcactcaggaagtaagttagcacaggtagaaaccccagcggtggtccttaggagaaggatccgagccgtccgtggagtggacttcagctcagtgctgagcagcccatgctggaacgatcccttgttctttggagtcttagtaattccgtccagaggctacttgatgggtgacagcataaagaatgagtacttctatattcttatgtctttaatctctcttggttttaagttataccatggtaaataccaatgtgtgtaatctacataaaaacagtactttcagagcatctgattgttgcagtgtataaagatgtctctggagaccaaaatctttgagaaccattgaaaaatgtatctattacacacacacacacacacacacacacactcaattaaatatacagtcctctgcccagacagttgaatgcactttaaagatcagaaattgctaggtggtactggcacacacctttagtcccagcacttggaaggcaaaggcaggtgtatctctatgaattccccgctagcctagtctacgaagtgtgtatggacagccaaaggccacacaaagagaccctgtcttgaaaaaacaaacagagagagaagctaacaaaatggatttggaggttgggggagacaggatttctagcctagttatcactaaactccctgcatcctcctgcttcagtctactgatgtttactgaaaatccaagctgtgctcctgaaacttgttttcctgaagtcctgtttgcctgtcagcactgctccacctggaaccccagatacttcgttctccattaagtacgctgctccacccctcctttggatagcgctaaggaaacatctattgcatttgtttatataacttatatctgctcttaaacatcggtgttttctgaaatacagtaaggggcattctgacttgattcctataccaagaaaaattcagctcgtgtttctctgtgttattctattgtttacatttcttgtgtttgttctttatgcttggctaggaagagactgtactagtcacatacatgtagcagttatcttgataataatggtatatccagaaacgtgggagtgtgtttgtcattttaaagcagttccttttaggattttcacttttgaggcatgctcggggttgccggccatatttgtagtcacagtaaagaaagtagcatggactggaacacggccaagtcttctctctgggaatcacctcggtgtggctaagtgagcagcgcaccctccacatacagaatctcaaagcaccgataaagttgaagtcaatagacagtagacagtggctcttataaacctgtgaccaaacctaacggacgtccaaagagacagccttccttgtggaagtagggagagggtggagcagcctcctctgaagggagctgatacttgacctgggtcctgttgcgtttgatttgatttttgaaaaggacaatatagtcttcacggtatgcattgggtgcagcagtgtccagcttcaacaggtgctcaagaaccccacatccgctgcagtttggttccatgcgcagcaggtaactgagagtgtgccataggcctaaccatagcagccaaacaccatatggtagttcgataaaggtacgtcatcaggagtttggattaagcaaagacttagatatagcaaaagcacaaagaacaaaaacacttggatagtttggacgtcatcacagtttaaaactttgggtggtagaatgcttacctcagagccatgtaacccagctgtgatgggaactccagcacttggaaggtagagggaggcagtaggatccaacgttcagagtcattgtcaggtgattagtgaattgagggccaacctgggctataaaccctgctgccagaaaataaaatgtaaacttcacttttataggactcaaataagacattgagtcagtaaataaaaacagaaagaagcactaaggggacagaggcaggcagatctctaagtttgaggtcagcctggtctatatagtgagttccaggagagctggggccataaagagactatctcaaaaactaaagagtgaaaggataactcacaagctcatgtatccagaatatatgtgcaaagcatacaatttatcagtcaagataggaacatcatactttaaggtcaggcaaagcatgcaggtcaccagtggagatgcaaacagcatctttaagacaggacagacgcaacattttatagcactttatagagttgtgagacacaaaagagtacttgaaggcctcccttggtatgggggagattctgggcctggggtgttagagaatagagctgcctctgtactgacagtgacaggaagcccttctggcaggggaggctaggtgtgcatagggtgcagatctgaccccaggagagccaccattcaccagccccaggtgagcagcaagaccaagagagactcgccctctgtgtggggacacctgagtgttcctctacacctgagacagggctcttctgtacgtctcagttctccttgaccttgcaatgctgacctgatgctcactgcaccctgcagccccagagataagccaagccagagtgaccatggagagcaaaggatgagtcctgtgggcaggctgccggtcattcacctgctatgaatgcagtgggtgatgcagactggcaaaggactcaccagtacccatttccctaccgtacccccagccccactagacaggaaagcaacgttcccagctcccagaactgagctggaagacgggcgacaatacaggatgcacaggagaaagtgttgtttgcctatgcagtcctccacccttctccctcatcatctgctagcgaggtatggcaaaccagtggaagactgcagcaccccagaaggtggcattgctaagaacactgggctccttgttagtctgtgatacaggtagcttttgttgcaattttgggtgggaaatgtatagacatttcttcaaaaggatagaaatagtagaggtcataaaaaatagttaagcatctccagttatttgggaactgtggatcagaatcatagtgggctacctcttcacacctgcaaagacacctagaggcaggcggtgttagcactgagaagaaggcgggctctcatggactgcttgtgggaatgtgaaagaaggggcagtcttttgggaaatgattcagttacataggaggcagcaattctattcctactggacgcaaataaatgaacacatatctccacctcaacacgtgaatcttcatagaaccattccctaaccatcaaaatgaaggaagcctaaatgtctgtcaacctgtaaaggactgaaataaaatgtagtgttagccatcaaggaaaagaaagggagagacgtgttcctcaatacagaagaacctagaaaacattgtgttaagtaaaagaagccagaaacagggtcacagactgcacggtccctttcattcaagtgtccagaacagacagggcctggcaaagcagacagtgagtgtctgggtctagggatgtgaggcagagtgggataggactactggtagaccctgagttggcaagcgttgcagattctgaaaatgctttcagatgcaattgagatggatgcatatgtttgtgaatacagcaaaagaattggtgatgtagtgtgttagaccttgaggaagccattttaacagtttttctgaaattataattacatcacttcctaccttttttcttttctttgacccccactacatactgttactctctttcaaattcatgacctctcttttttcctttgttattgttacgtgtgtgttcctaaatacataaaaggcagccttctcagttgtgtaatgttcttgtaggtatgttttcagggctgaccagagaagactgtctgtctgctctcagcattcctccgttgcctcagttgcttggtaggcttgaggcatcatgcgctcatcttccacatgagcatgcccactggtatcttccttgttgcagtcatatttaggcagtcatgctggtgaggcatcataggtgtagattctctggttattttaggagaaacagtctcacagcaaagaccctgtgcttctgactcagcagtcgctaagccttgggtctgggagttgtgctgtagttatatcagttgagactgggctccaaagctctgtattgtgctgctgtggtgttctgtaatgttctccatctgttgcaaatcagagtttccttgatgagggccgaggactgacttactgtgagtctaatatatagaatgtatgtagtgcggtggcagtgataggttctcctccaagacgtcatcagccctggctaggtgtccagtaccaggtatgttttctctcttgctgagtaggtgaaatcatttttaagagtagcctttggaggatcggaaccaaagaatcaaagacttacaaggaagtagaaagtgtttttgtgagcagcagcttgactgtagaaagtgttagtgagctagctgcacaggtacacgaaggtgtatgtgcttctcagcactggtgtagagcaaaaggaaaccagcaaaatacacatcgccaaagcactgggcgggatcagtgaggtgaggtggctcagcggggaagggtgcctgctgccagtgctacagtgccactcgaacgccatccccgaactgcatggcgggacaaccacagattgtcctctgacctccgtgtgtgcaccacctcctgcccccatcataaaaagaaaaggggggaaaaatcactcaatcagagcataactaatgtattgcattcttctgtggctttttaaagagtttaatctttatagagacttatgtgagaaataatcttcataatataaatcctttttaactttagattggcctacacacagatgtttaacaatacacttttcaaattaaaatgattagcatggggaagtcagatggaggagagagggttgtgtttttcttcatagacgaggtcttgggacattcggcacaggtgactggcgcttgctgcttcccttcctccttttcaagacgtctcccagagacttggctcaaagggggttggtgatggtggtagtgatggtggtggtggtggtgatggtggtggtggtggtggtggtggtgattttcctctggtttttttgttttgttttttttaagaatttcttatatttcagcttccccttggtgaacatgttagatttctcagaactaaaaagtgactaaaacacacattataaccttgagccttcgtcctttccctgggtcccactgaattgttcaccatgcctccatgatgtctccactgtatttcttgtccttctgtgcttggtgctgctaaactgccagtgagctttgtggagacggtccctcggcctgcatgtggtgttttcttgtgcttgtgctaatgctggcccttcttggccaaaatgttgtccagccgtgtgcgggagggtgcagtgccatgtgggagggtgcagtgccctgtgggagggggcagtgccgtgtgggagggtgcagtgccctgtgggagggggcagtgccgtgtggaagggtgcagtgctgtgtgggagggggcagtgccgtgtgggagggtgcagtgctgtgtgggagggtgcagtgccagctcacactgccgctgaggtttacctagaccactctgctaaggcagtgcctgccaagggcttgcattgtaaacttgtttttccctttgtaattactctgtacttgaggagctgcttaaactgtgccaaatccttttctgccagacactgcctatagcacagatcgcagatttgctggtgattatcagtttttctcattccttctacattcagaaacaaggaatagtttcatatacactgcaaaatgtttgcagtaataagcaaattagcatatttattactcatgtggctgccgtgggtgtgtctgtggggggtgttgtaggggggtgtgggtgtgtgtgtgtgtgtgtgggtgtgggtgtgggtgtgtgtagggaactgttgagatctcttcacttagcagatctcaagtacacttagaaatattcctaagcaccgtccacatctgcacatgaaatccacagagcccatttgttgtacaacagaccgctcatgcctgcttcagaacatctgctagctacttcctctctgcttctgtgagctgagcttgaagttccatgcagaaggggtcacacagcatttgtctttctcacatagctcatgcccatgctgtttcaaatgacagacactcctttttatgcttagtgacatcgcgttgtggtacacacagcacttgctggtgggccagtcatctgtcaggaggcagttgaatggtttcctgcctcagctcccaggaatcagccacagtgaatatgagggtgctgataactctgaggtaccgatttcatttcctctgggtgtatgctcagaagtgaggctgatggttttaatattgtaatgaagtatttcctttttaaaacttctatattcccataccacctgtggatatacagttgtttttaaatgtcaggcaaaaaaagttatttcctaactaaaaactacgtgacttaaacataagaccagtcctccatatgggtgtcccgttgtggctgggaattgtgagttccggtttctctgaggatgatcctggttctattatttgggaacttgtagttggcaggctcccatcctgtgtgtaagaatcctacaggcaaggtgggcttgtgctgagaggaagggcgtcggcagggagagcggcctttaccagtgcttctgcaggagtatggtagatggctcttttaaggattttaaaagatcatttaaaatacttaaatactttttctgttccttcctgtaggacatgtttgcctggactgcggcaatgattaattaatgttctaagtgaagtttaaagagcacagaaaaatacaacccatgaatattaaagtcagcactaatgggtgatccatttggtttttttaaaaaggaaaaacctgatcagtttcttttttccccttctttccattctatggaagctgttttcttatctacaactgtgtggaactggtatagcaacgcctttcccggtggtgtctccaagcttcccttatttggtcaggaaaccccattttgattttctgtttgcatgcattctgatggcttgtcttccccctttctgcctcagttcgttgttcctaatggggggagggggtcctagcatttggaattttctttgatttacccttgatttacatggcaaatagaaagcagctgtccacttaagcatctcattcttggaaccatagtcccctccagcgtcatctggaaatgatggagcttggaaagcacagctaagaagaaaaggcaatgtttgttttatgtgggatgagtgatttctgttggggtcctttaattcgcctattatgagggttattaaaaagcagtattacaaaagaggcttaaatgaaaagaatttttttgagctggtatcttattattacagttgattatagtcaaagctacaaatgttttagaagtggcactttattttagtttctccaaataagacccaaaaaacccagtaatcttactcattgtatgagtggaaattcaatctttcccttgattgatttaatttctgaaaacaaattgtgtttgagaattcagttctagcatttttttcatggatttctgaaaatttcttacaagaataatccttacaggaatatttgaggatcaccatagagcagaaccctgaaatgcatccatccagtagactcatggcgttctttaaaagtctgcattcccagcaaggccttggcaacttagtgcattcatgacttccttgactcctaagccgtgaatgtagagggttcagtgctgggaactggtttactttaggaagcaggaaagtcattcttgctttgacaggagttagagtcattctgttattggactctgtcaacttttcatgtctgttaatgcagccgctgcttccagatagctactattcaggaattttgtttccagggcttaagtgagggcgcttagcctgtctgtctaactcagtacggcaggcagactcagttacttttgtgcatttgagtaacctgtcgtctctcctggtattttctaagatcttaaattgatgttttgccaaaggacagaaaaagtgtgtggtattcctttggcacacagcgctggtgagcacactgagcgcctggccattcatcctctgtaaggtcgtactgttggctcagggtgtcttaacaaaggataggttgagaaacttcaaccataaacacttccttctcagaatttgaaggctgaggtgcaaggtcagggtgctggcatactgagtttcccgtgtgcttaaggggccttttcctagcacctgcacccagctcacccttgtctgtgctgcccatgggtcctggcagccctgccctccccacctgctcacctcccgatcccctgtcactttatactccgaggtattcctgtgagtttggaaaagagttgaaggacaggctagatttgttggtaatagttgcctccaagtgaaggagtgtattcaaacggacaggagtgaagctggttctcggagtagctcttatcctgtgaggcgactgatgaactatacctgactctgaaacaacttaacaaccaaatgaatccagttggtgagcaaccagacatctaaatggctcagtccctagtaagctgtatcataatgacacaggcaagaggggaccagatgatgtcactggaggcatgtgtacagaagctctggctttgtcatttgaagatgcatgtttgtgtttcgtgagaacaggcaagcagtggagacacgatgtcgtttccccatggtccttggaaccggagcttccaagggaaatgagtatagacggtcggaaaagaaaagcaatgatggagaaccctttgatcttgaatagaggtgatctgtgtggggcttgtctcttcatatcttttgctggtctggccattttacttctagtctttgaactcataaaagcagtgaccaacccaaccaactagctttgatcacctcagcagtggctcttccactggaagcccagccagtccgcccctcagtactgcaggtaacagaatggatgaagggaaactcccttgtggagaggccttagagctaataaccagcagtgactttgtggctgttggcttccagaaagaagctgctttagatctcattcatcccggctaggacacacccacctatgaagtgcttttaccgaaatcaaaacaaagacaaacaaaaaccctgtctatttgagcctgctaccaatttaaatatcaaaaaggacctattgcatagaacttgcaggtgatgatagagttatcctccttcctccctggaaacagggcagtggattctgcttctaacaagattgctttaaagctggtcttgaaatagagaacaggagcgtggtgaccactctggtgtccgttcttttgcttttgtttcatttgtttttctgatgtggtttggattttgtttttgtgtttggagacaaggtcttactgtgtagcaccggctcttctggaacccacagcagtctttctgtttcattattacatactccattcttttatattacattgagaacggtataaaaaaattgcatttacattttcacaaaggggaactacaaagataaataatggactgtagaaaaatctatattctctgtatgtgaataatgatacaaatctgttccccaactcccaagaggggaaaaaatttttaattctcattttataaatcactaattaatcacattgtatgtccaagttttgggttccaccctacaagagtggactgtgagttttcatccttttaaagctggatagagaactgagtatatgaaggaactggggcgatcccaagcttcaggtatagacagtgtcaggtaggcatattgtgctggctagttttatgtcagcttgacacaagctgtagtcattttggaaacggaaacctcagctgaaaaactgttctcactagcctggcaatgggcaagcctgtgggatattttcttgcttgacaattgtgagaaggcccagctcactatgggcagtgccgccctgggctggtgctataagaaatcaggatggacaggcagtgagcagcaattttccatggcctctgcattagttcctgcctccaggttcctgccctgacttccctcatgatggagtataacctcagagctgaagatgaaacagatcctcctaaccacgttgatttgggttgtggtttatcacagcaaaaggaacctaacaaggacagcgtatctcaaagaatcagttgtgagttgaacattgaggatgaggatgaagaggtgtccgttgcgtttaggcaagcaggtggcacttgacgcttgagagtgtttggtgtccatgctaaatgaatgctgtagtcactgtaaggagtagattattttagttgaagtctaagaagtagggaccagcatgagttttctcctctctcttctatttagcctttcgtactctgtatttctgttgttgctgttgttgctgttgctgctgctgctgttggtttgccttgctctatgaagttcttatctgggcattaattatagtaggtgagcttgtctaaaatagcaagggaaatggctaagctgaagagctcaccacacaccgcacaggacatgagttcaaaccttcagaacctgaatgacagtcaggacacagtgtctcgaaattttaatgccagtgttgaagatgtagagaaagaaggattcctgggacttggtggccagctcagctagccaattcagtgagttccaggttcaggtgagaggtcctgtctcaaaaaactaatgtgcaggttcaaagaaaatactcctaaaatgcgagtataagtgtgcttgacaaatgtttgtcattttcctatcaaaatggagacaaggaagagacttgagccccaagcaccagagaaggaagtgtgtgctgtctaacaaagggtgacagtgccatgtgcacgtgcgcgtgtaccaactcagaaagcttacactgtttttttttttttttatctcctgcttttatcccagtgtccttactgctatattacttctgtagagccttctgtccaatgagttcaaagcacttaccgtcatcaagtcatttatttcttggatttattgaatgggcacccattgttcaaaagcctgtgggcgtaagtacaaagttataaaagcacacaaattaaatgtaatggcacaggaataagagagaaaagcctgcaggattgccgctttgcctgttaggaatgctgtactcttatttaaaaaaaaaaaaaagagtaagaaaggaaaagaaccaacaacctggacttcatcctgtcctgagagctacaaaagaatctgtcagaggactgaccatgctgtgctgctcagagaagcctcattgaactttggaagcattctggaatatactgctcctctcccagacctagttttttgctctagaagcaatgcataagaaattcttgttccctccctctgtctgctgcacacattcagacaaaaaggaattggttgaccaccattgtctcagcaacatcataaaatgtgaggtgtagttttagtctcaggggcccagctaagtcttgggttcattttcaactttttaacatatagcagaagagcttagttgcacattgttgtggttataaaaagataaaggggtataaaaatatgttctatgggggtgtggtgaggtgtgggggaagggggtatctcagcgggcccatgccaaggcatcccttccccctgagggaccagccacatgatggtatagtatagaacagggtttatttagggcatggggaggggagttaagagagtagtagaggcaaagacaaaggcagagagagagagagagagagtagagaagtagaggccggccatggtcatatagaatggagggagcaagaggcaagaataagagagtgaggaggggtcaagcagccccttgtatagtgtgccaggcctacctggattttgccagataactgggggggtgggggagggggagtccagacagaataccaaaacacgtgcttggccttgatctggtgctgaggatgggagctagcacggaatttaaaactgaactcattaattgcattgataaaatttttccttaagtttaaaggaaagaaatatgagcatctagccgtagaccctcataaagtagtaaatgtttggaatccctttcaaacttcactttacacataatggcagagtcctggccacaggaaggagcttgccctcacccgagaaggcacactttggtgttggtaatctggggagagattggcacagacttctgataagcatacgttccaaccctaggtgctttcttctagaatgtccttcagctggagggctctgatgacatgtggctaatgaggtattacagccgaaactgggacagttctgtgttcctcatgcaggcctttccacgcctctctcttcccttctctctgcctttatattatgtcccataattcacagctctccccacaggacccatgagccagctccacctttccataaggtcattcccatcccatacctgttaagtgggtggcctgtgtcatccgggaaaggcatggtggctctttggttggcgttggcagaagcgaataaaccacatcacttagcctggtgacctggaatccctcatcgtcagcccaggtgacagagctttgtcaaggccagatcacagaaaagcacagaatgctgggtgagcatttgttcagttccacattgtcaaagctcttacaggaggctacagggcactttctgctggccgctggcttgagagattctgtcaatgcaggcgctacctgctgcacatgtatctagtgtactgtggagttctccctctgtgcttttgtctgccttttggttttcttatgcttttttgctcaacatgtataatttctcatacagtttactcaaattttaacagacttaaaagttcaagccacagagaaggttataatcattctttaatttggcttaacacaccagagttagagatagctgtgacttttggataataaccaacaaattagttcaaataatgtcacaacacatttcttatatatttaaccaaatgtgtaggaaagctctgcttcccagaatgcttgcttagagaggcattgttccttaggagtgctgtggggttactaaaattgggtttttactgccatcaactaactcctaatgtgatgtctcaggaaacccaaagtgatttcaaacctagagccttgcttatgctgggcaaatgttgtaccactggctagttaggactgttttagctgacagtgagccccaagaatgctgggattgcaggcacacatcatcacacccaactcagggggtaaaaggggaagtggaggaggacacccgtgtggtgtgccgtgctgtgcacatggaggtgagagggccacatgctgaatgggccacatgcagtccattgtttcagaatcaagccagagccttgttgccttcccagccctcactagctttgttggtaagaacagatttttctgtaattgttcctatacatatttaggtccttgccaaagttaaatgaatgacagtcattatgaaaaaggctttctgtcaccctgtctcatgtagagcaagaacggttcagtgtgtagggcgtgcatctgagataaggcgtcatcttccatcactaactctgggtctcgaggaaagcatggtctgcctatagctaaataaaaaccctgaagctgcccatttctcctctgcagactcctaggccagccgaccagacaacggtggcacttcctgttacctcaggctcatttctttttcttttttcttttctttttcttagtaaagatgagaaaatcaggctagaaaagcaaaattgtgtttgtttacttgcttatgtttggttttgctgaaataaggtctcactgtgtagtctgaacttacccaaactcaaagttatcttccccctgtctcagtctctttagtatttgaagaacaagcacatactactatgcccatcagagaagtcacatttcattgtcacacatttctgaagccctcaccctcgtggttagtcatcttcaagtcagacagccctgtagctctgcagtagacaggtcctgtgtttctgcttaacaagacagtgggtttccccagaggtgggaggagttgtttacctcagagtgctccgtgcgcccttggcccagcactggtcccatctcatgagagcgtggctgtgaacataccagaggccaagccttgtctgtccccagggcccactctacccatccagccctcaagcataggaagtgtgaggcaggtccaggaagaagacgtttgcttgtcaccttgctcccagccgaagccatgatgtcacagttcagtgagttttagtaataagtgacagaaataaacaaatgtttgagagcgtgacatactgtagagaacatcaccattacattccttcctggtgcggtcgctgtgctttggtgagaaatggcaccaagtaaacccggtgcacgtgtgaaacctaagcttggctccccagcacccacagagaaggctaggcgtggcaacactgcctgtgagattactggaggggcagacactagggtcctggagctcactggccacaagcctagctgagcatgctagctctgggttcttggagagaccctgtgtcagcagaggaagatggacagacagcaggaggggatacccagcattgctctcaggcctgtgtgtgtgtgtgtgtgtgtgtgtgtgtgtgtgtgtgtgtgtgtgtgtgtgtgtgtgtgcgcgcgccgcgcgcgtgcgcacagaagagttgcttataccaaagcattaggccaggggccacatccctctttacaagtgagttattactgtgccattttgtgaagggtggacttcatgttagtcaccacttgtttgcttcctattttaattttaatcttttttttccatttttattaggtatttagctcatttacatttccaatgctatacaattttaatcttttacttattgataatttctaaaaacttcttcctgggaaatagaagcagatctctctctctctctctctctctgtctctctgtcacacacagagagagacaaacagacagacagcagttaacagaagatgggccctcctaactcaggacgtgatgacactgggtgtctctctgaggtgggccctctgaagcctggccttccaaagggagcagatattcagttctactacccccaccctcaattgatttcatagaatacgaacataaagaatgaaaaatttgaatttttaagcatataatcacaagcaacaatagttggaaatggattatgtatgttctttgggtgcctttgaggtttgaaaaatataaacccactcatatttgtaccagggatatcttgacacttgctatggcaaatgttctttgttaatataaagatcctcagactgcttttaaaatcaatttctgccataagaaataaattgcaaatttagcgcagggccacctcctaaagtttttgaatggtaattgctaggcaataggcagttcccatggcaacatcagtgagccttgctctaattgtacatacagactgagtcaccccattgccgttgcccttgactgaagtgtgggtattagtagatatctggacaaaatgcgggcattgtcccattcattaggcaactgtaaccacagcttttgatcatcaaagtgctgaattgtatagcagggtttaagtcaggctgtcttcagttagggtcacctgcatcagttatggtcacagcattatacttagagtatttttaacatatttctaaacaaattaactgcttattgtaacaataatatttactttttttttttttttttttttttttggtttttcgagacagggtttctctgtatagccctggctgtcctggagctcactttgtagaccaggctggcctcgaactcagaaatccgcctgcctctacctatatttacatttttttaagttctcaagttttcagttttaatgtacatttttacttttcgaaaagctcaatatatcttaatattctgctcttaaatgttttctgaattagtatttgtgttcattctgcatttttaagattttattgtgctaattatatgtgaatgtatgtgtgtgttggtgtgtgtgcatgtatgtgttgtgcatattgcatgagaatgtgtattagtgtgtgagtatgtgtatgtgttgggggtgtgtgttggggtgtgtatgtgaatgtgtgtgttgtgtggtgtgtgttgtgtgtgagtgtgtgtgtgtgtgttgttgctccatgtatgcatgtgctagggccggtgatgttagatccctgcagctggagttggagacagttgtgaccacccaaaatgagttgtgggtcagagctcagctcctctggaagagggccgcctctctgaaccccgagtctgtgctcccccccccatgtcagcccgtccgtcccttctcctacctcacatgtttgagaagagaagcattactctgtagtttctgacctctggagctccctctctacacctaacaagatgatcgtgactttctcctctgccgacttactgtggccacacggagactcagccctgagactttttattacagccttggatctgatgtgcatgtgcgaagtggactgttttgatgacactggtcttttacttctgaatgaactttcccagacttcgaagccatacttaatgtttctgatttaagaaagaaggaaacgagggttggtgaagtggctcagcgggttaaggtgcttgtggccgagtctgatacatgagttcgggaagcacatttgtcccctgaaggagagaagtcactcttagacgctgtcctctgattctcgtgctcacgccttggcatgctcgcccatgcccctcccccttttatacattaagtaaatgaagaaatcgcaccaaaaaattgtcccttggtctagagagattgttcagtggttaagagcacaggatgctctttgagaaaacctggcttcagttcccaaaccccacgtgatggctcacagcgtgtcacatcgtgtaactccagttctagaggacccagcaccttcttctggcctccaaagcatacacatgctaagcatctacacattcaggtaaaacctaaaacacccagtcatgtaaacaccagtcagtaaaccattttaaatgcttctgtagtcttgtatgttctctatataaacatttacatttttgctaaagtattttatagtaaattctggaattttatctcttcatactttgatatacatctcccaaaacattgtcattttctttataatcgcacaccattctcgtacctaacaaaagcagtaatgttcccaaggcatcagctcatgtagcacaatcctatttcttctgaattctcagaaatggctggtggcagtgtgttaagttagaattaagattcgcacatatggttgttatgtctcctaagtctttaaattagagcagtccacttcccttttctccccagccgttaacacattgcagaatcccggccacttgcacagcatctcccccactctgagcagggctttggttttgggttggggggtcagttatctcttggtcctttaacttgctctctggtcctgagtcatggaagtgggtatttacactaaaggtttgcacagattcagacagattcggctttcttggcaagagctcttcacaggagtccagcttgcttcccccagcggattggacagttccccttagtcctgtactgtggtggacactagagtggtttccccaaactgcaaactcaccaccttgactgtgattgaatactggaccttaattaggattcaaagagattgtagaggtgatgccctcatccaatagggctggggtacaccaaagtctgcctgactctagctgctcacagaggaaggccttggggccacacagagaaggtgtctgtctccaggctgtgtgtctgtccatctatctcccctgctgcatgtcagtgctttccccttctctcttcagcagtgtgtccatttctgtctgcacttaacagaagaggacattctgctcccgtgctcagagctggacacaggctctgcctttattccgctgtggcctgcttcctttgggtttccctctggtttatgtcatttactgtctaattttactgttttgatatgattttccgtctttgcagggctggagagggttcaactgttaggagtacaccctgcccttgcggaggaccttcacccacacccatgcacatggccacacagagacacacagttaaaaagttgtgggtttttgtttgcttgcttgtttgttttttaaatctttgagcatggtctcactgcagtcctagctggcctggaacttgctgtatagtaaggttgccctcagactcacagtgatctgcctgacaacgtttgtttttggtttggttttgttttttttaagtgactggtttttttgttgttgttgtgttgtttttcattattctctctctctctctctctctctctctctctctctctgtgtgtgtgtgtgtgtgtgtgtacaaaagaacaccacagagcatatgtgtgggtcagaagacaattcttaggaatctgttctcatctgccaccttgtaggatccatgaatcacgctcaggtcacttggggcctgcatgtgacagcctcagtccgagtgccactttccgggctggatctgccttttgaatgcaccttcggttgcagctcttcagccgaagagctattcgtgttttctgggtgatttgcaaggctttctcatctgtcctttactttttatgtatattgctagcatttcccttgtcatcactctttctcccacgtatacagtccctactttgatttcattaagtctctttcattcaaagctggtttgtttttttttcttttaagagttttgagccccacccccacccgacacatacacaactccttcctagctctctatgaagcttatgaaataggtttctctcttttttttcccttttcagttttccttacatttgggttgacttgacggcccagctggccacccttccagaggccccacccggttcagttcccatcaagcctgtggtgcctcacagctgtctgtaaccccagtgccagaggtagaccgccctcctctgcactcctgaggcacaggcacaggtgtggtgcacaaggtgaaagcgctcatacctgtaaataaaattttaaatgggggaaaggacattttaacttcattttacattttaagtctttatattctaggaatcttttgttggaaaaacagattagaaatccatccttcatggtctgtggtggttttgtttttccacttgattacttctcagggccagattcagtgccctttcctctggcaggaaatggagtcttagagattgctaacttttctcacttttctcctgtggtgagtgttcccgaggcctcgcctgcctttctcttctgcctgtctgcccttgagtaactcggcccagcatgttgctatggtggaactgtcagtgagccctgattcctcttctttttctctctctttttttaatgttgtatattaaatgttttcttcttttacatttcaaatgctatcccctttcctagtttcttctcctctgaaaatccccctataccctcccacctcccctgctcccaacccacccactcctgcttcctggccctggcattcccctatactggggcctagaatcttcgcaagaccaagggcctctcctcccattgatggccgactaggccttcctctgctacatatgcagctagagacacgagcactgggggtactggttagttcatattgttgttccttctataaacctgctgacccctccagctccttaggtactttctctagctccttcattggggaccctgtgtttcatttaatagatgactgtgagcatccacttctgtatttgtcagacattggcagagcctcacaggagacagctatatcagggtcctgacagcaaaatcttgttggtatatgcagtagtatctgggtttggtggttgtttatgagatggatcccagggtggggcagtctctgcatggtccttccttccttctcagctccaaactttgtctctgtaactccttacatgggtattttgttccccattctaagaaggaacgaagtatccacactttggtcttccttcttcttgagtttcatgagttttgcaaattgtatcttgggtattctaagtttctgggctaatatccacttatcagtgagtgcatagcatgggtgttcatttctgattgggttacctcactgaggatgatatcctccagatccatacatttgcctaagaatttttataaattcattgttttaaatagttgagtagtactccattgggattgcaagctggtacaaccactctggaaatcagtctggcggttcctcagaaaactggacatagtacttctggaagatccagcaattcctctcctgagcatatacccagaagatgctccaacatgtaataaggacacatgctccactatgttcatagcagccttatttataacagccagaagctggaaagaacccagatgtccctcaacagaggagtggagacagagaatgtggtccatttacacagtggagcactattctgcttcctcctcttgcactgctcacacagctgggctggagtgcagcacccgggacctcatgcagcagcccctatgaggtgttcctctgccgctcctaacaagagccgggctctccatgcagttcattttatctcattgacttacagagtcatccctgataggtcaggaagactccagatgtgcaacttttctggtgttcctgataatagaggaagaaaggcattcttctcctaagcaggaactcaaggccattttctggtttgccatcttccaccacaccccctttaactcacagagcccatctgaaggaactgagcacaagaaagtgatttgcttaagacaactggaagccagccccggatgcccaggctgaccagtgctcccacacacacaccaggtgctgctgtgctcagcatcaccgactctgagggggattgcccggctctcaggcctgtgccggtcattctcacagatatctgtgtttctgtcctcctcagagctaccagtgactagtcaacgttgtgaaggagtcagaagcaaaattttaattgtattcgttcgaggtcactgaagatttttttttatgttaatcatttttttggtagctaataaaatttgcggagtaatttttccactttttatggagactcaacagtgagtattgattttgcagatgactaacctggttgactgagcagaagttgctgagctgaggagggtaacactgtggctctgggctcaccgaataggaagacagacactcagggagtcaaagcttgaagagcaggcggggtgggggtgttcgttgcttggttcattgctttctttgtgggcagggcccatctttccctgagtgttgttttaccaggatttactcaagattttactctttatcgagtgtagaagggtgttttttcacaagaattcaaagctgagtacagactatgaaggtgagcatttacattgtcaggctctggcataggcgctgtcacagctgccagcagaagcccggggaaggtggcctgctctgctctgaatggcacccagggcagagaagccactgcaggcatctgctggagcacagctgccccaggctgagaatagtccccgtgcagccctgcctccagctccctccatcagccgcagagttggtcttctctcagaacattccttcttttgtgaattgtctgtccggtttccagttgtgggaaactgaagttaaccaatgtcccctagtggccacagttatcttacttcagtgccaccagtgccagcactacggtgtgttatagatcacttgtcccagggttctaggcgaggcctgtgggtgacattcagactgtgtccacacaaggggaagaagagtatgggtctcacattcccacccaagagaggcatgccagagctctgcttccaccccacctgcctgccccactcattaaagtcacctattgtctcctttggttccaggatttattcttgggctgtgatctgtgtgtaatataaagccagttctttctatcacaagctggatgttttgggagagatccagttgtggctagaaataacatggtcacaaagcttttcagtgtgtgtgccagtgaattaacaacataaagataacaagtctatcactgagagcttgcctttgaaggccggagccgtgcctctgcatttcctccccctccccgcctttggcaaagtcccattaattttgttgaaggttttattttctgctgaaaatgcaggaaatttagacaactttcttggaatccccccaaaactaatacaaacaagatacatatgcttctcttaaggaaactaaaaataaatgatttgaaactgtataaattccctcttaaaaggaaaaagaagtttttaaaatgagaggcggctctgagtgttgttaactgggtaaaatattcccacaactgccaactgagccatcaatattgaattattacttgacacagagttgttggactctcatccctacatggacagagactgggactgatcaccctgggtccttgtttctacactggaactgtgtgcacatgctcacaggcacatgtgcgcacacacacacacacacttggctcactgacttgctctgggctccattcctgccatgcaaactgtgtatcctgaaaagagcagggtgtggatgaggaaggcacatgggtttgttctgagtactaggttgcgctagccaggagccgtcatgtggcttctggttttgacacagggatttcccctgtagctcagactatcctagctgaaatcttcctgcctctaccctgagtgtttatattatgttaagtttgttttcctgagatatagggtctggaacatggctagcctggaactcattatgcagtatgtaggccaggctggcctggaactcacagagatcctcctgcctcggcctcccaaattctgggattaaaagcatgtgcaagcacacctgactatctttcttagtttcctttcattatttattttaaaattttgttttaaatgtgggtgacagtttgcctgaatgcatgtctgacacccccacaagccagaagcggatggcagatccttagaactgggttataggtgatgtgagcccccatgtggatgctcagaactgaacctagtcctctctgaaagcctcaagtgctcttaaccactgagccatctccggagccctgtgctctcattacactgtaactggctcttcagggaatactgtacagaaaattgatttacattctgtaatacagtaaactttataaaagtaatatcttttaaaaatctaaccagttccttcaattctctcagctgctcttgctagagatgctgtttgctgccgtctgaggtggctgtcgggccagtcaaacatctaaatcccagcactctctggaatttgaggcttgatatacagagacggagttccaggacagccaggaccacacagagaaaccctgttttgggggggggggggaagaaaactaagaaatattatttctgtgttctttggctttttattttttcatttaatagttgtcttagggttttactgctgtgaacagacaccatgaccaagacaactcttataaaatcaacatttaattggggctggcttacaggttcagaggttcagtccagtatcatcaaggtgagaacatgacagcatccaggcaggcatggtgcaggaggagctgagaggtctacatctccatctgaaggctgctaggagaatactggcttccaggcagctaggatgagattcttacagcccacacccacagtgacacacccactggaacagggccacaccttctaatagtgccagtccctagccagagcatatacaaaccaccacagtagtaatagctaaagaagaaaaaaaaaaaaaaaaaaaaaaaaactgtgtcgttgttgtagttgtcattgttgtggttgttgtggttgtgtttgatgttgttgtttacttcaaagtatacaagttcccacttggaaagcagtgtgtgtctcctggaatccccttctgcaccctatgttgcacagtgttaagggctttacaaatgctactcagctgttaaaaacaatgaatttatgaaattcttaggcaaatggatggaactagaaaatatcatcctgagtgaggtaactcagtcacaaaagaacacacatggtatgcactcactgataggtggatattagcccagaagctctgaatacccaaggtacaattcacagaccacatgaagctcaagaagaaggaagaccaaagtgtggatgcttcagtccttcttagaagggggaacaaaatacccatgggaggagttacagagacaaagtgtggagcagaaactgaaggaatgaccatccagagactgccccacctagggatccatcccatacacagtcaccacacacagacaatattgtggatgccaacaaatgcttgctgataggagccatatatacctgtctcctgcaaggctctgccagtgcctgacaaatacagaggtggctgctctcagccaatcattgaactgagcacagagtccccaatgacggagctagagaaagaaccgaaggagctgaaggggtttgcagccctataggaggaacaacattatgagccaaccagtatccccagagctccatgggactaaaccaccaaccaaaaaacacacatggaggaacccatggctccagctgcatatgtagcagaggatggccttgttgaatgaacatcaatgggaggagcggcccttggtcctgtgaaggcttgatgccccagtgtagggaaatatctggacggggaagtgggaatgggtgggttggtaagtagggagagggggggatgggatagaaggtttttggaggggaaactgggaaagaggataacatttgagatgtaactaaagaaaatatctaatgaaaaaaattttaaatgctactgaaacagaacttcatggaaaaatatctactaggaggctgagaggtcagctgaggtcagcgactcccacttagcatgctcagggcctggaattcagcacccggaccagtttttaaaaactgagtagcatggaataaataacatgattaaatcaactttgagatctaaagtaagtcgtgggatttggatggtactgtcattaaaggaagtgctacaattaatttatgctaggttgtttttatccctttttcaagtagtaattattgcctaataatgcttttttagaaatgaaacaaaacgaattttattgattttttttcctgtcagatattatgggtacctgcctcaggatccagtcagagtggctggcgacttggtgattcagactagagtgtatttagtgggatagtgtttcttggaaattagaattaagcaaaagtttgataatcttgtctttagcaaatctgaattcccctggcatgcaatttaccctgattatctgcttggtgcctggaagctgcagttgatcctccagtggggatgctcagacccacagaggagtttctaggaaacaacataggaggaactccggctgtttcttaaaggataattaaagtggttagcaaagaactgttgccacttaaaatggaaatgaactagttgccagaactgtgtgcggtgtgttcaagaatagactggttgatccctgggatgaacaggagggagggagggagggagggagggagggnnnnnnnnnnnnnnnnnnnnnnnnnnnnnnnnnnnnnnnnnnnnnnnnnnnnnnnnnnnnnnnnnnnnnnnnnnnnnnnnnnnnnnnnnnnnnnnnnnnnnnnnnnnnnnnnnnnnnnnnnnggagggagggagggaagctagcagtatggcaggggccagcagccgcagccttgctgcccggaagcttcagagcacaccttaggatcacacagtaggccacctaattcatgactgcactaaacaattaccatattgaataaaataatgtatatggaaattcttagtacaattttagggacataattaaaaccgaccatgtaggtgctgacttgaaggcgaccttggtctttctcgggagtcagagcgaaccctgtgggagtaactgtaactggcatccagctggtgcagccttggagctgcctaagctgcgtcccctgcatcctgctggacgcacttagctgcactcattagaatctcagctgaccttgtcgcatgcatgccctgtaggttttagagtcaactttatattgaaatgttaatgatgtacattatttacagtgttacacggtagaagagatattggtaggaagttattgtagtctatgactcgttctaagcttgaacttctaaattatatgtaagttctcatttttgtttcctaatcaattcataacattaaaataaccaaaactgtcttacattctagtaaaatatgacatcatataaagtgtccttcctttgtttcccccaactgtatttttagttaatctaaatgatagaaactgtatttcttgccatttaatttatatatctacggctaaactgtagtaatgtagtcatacattaaaggatagcattaaaggatagaatttgccagagatccaggcgtggtggtatattcctttaatcctagcatttgggaggcagaggcaggtggctctccgaaagtctcagaccagccaaaactgtaatagagatatcctgtgtgaaggaaaaagggggggggggcagggctacttaccagagaaacagtagcagaaaagttaaatagaatacctagtaactcctttaaatgtgaggaagttagcataactctgaaaaatccttttgccacactgaggcacagtaaccactgatagacgctggcatagagatgcagagatgcatacctgtaggctcagcatctgagaggaggcagagaggcaaaaccagcctcgtgacacagtgaattcaaggccagcctgggctacctgaaaaccagtccttaaaaaacgctaatgtggggcatgcttattgattttgaagcattaaagtttccactctacacttccctgactagtgtcttagcttgagattaaatgagcaagtcctggttgtttggggcaattacttaaacattgggaataaactaagctatcagcacatagttaatcctgggaatgtgcatttaatctgtcaggacttacacttaactaaattgatgtgtaaaaccttcattagaatgaaatttggcatcttggcatgctcctgaagtaattaactatcaggttaggtttctctaaaatgacctcagaaaatcctgaaacacattcctcctctaagcaggcagctaagtggacattctgacaaatgttgttgaaatttacgaagctggaagttgatctccccctttgccctgaaaacataaacttatagatgtctctaaaatgaaggcatttgaaatgcatagctatggccaaaactgaggtcagtgtttcttgatgagccccaaacagagtgagcagtttggggatggaacagattgactgaagagatgctgaccatggggcctgggaggaggccatggggcctgggaggtcagcagttgatagtaccacactggagagcttcagggaagcaacataggcgtgcacgcacgcacacacacacacnnnnnnnnnnnnnnnnnnnnnnnnnnnnnnagagagagagagagagagagactcccctgctgggaagaactaggaagatggctcagcaaaagcctctctagttgcttactttgagttgctgccttgcagtcgtttcacagtcagagtccaaaagactgttgtcttcattactgtcctcatcacaaattcctgagcagcccccaaccctaaaaaaggaaatcagtctaggcaaagaagagcttggctcacagctcagatgaacacagtccttcatgtgggaaagcagcatggcagagcacaaggtgacctgtcacgttggagcctcagactcagcccatctttctcagttcccctttttacttcagtctccagccccagcccataggatgctgccacccacattcaggagtaaacctgggttaaacctctctgggaattccttcaaagacatagccagtcaaactgatcacagggacgagccatcacagctgtgaactctgaggagacagtgacagaaacacgggctaatgtatgacgttcagatggtggtgcagcccacggggggtgtgtcctgacgtgatcacttttcttgtagtggctaagacttcgggactggctacgctgtggccgtctaatgatttaggcagagaataccaataaggatctgcaagcgggagccaaatggcctgcacgttttcctctgtattggctaatacctaacttagtatataagttttaactttcatcccttagtaacagatgaacctaactttaaaattcttgacaagctcttgaaggccatacctgtgtaatctttccagtgcttttgaaattgtcactgtcacttgcatttcggttacttctgtggcagggaccaaaacactgactgcttgttggggtttcctttcttcacaaggcacaggacctcagtgtcattgaagaagtgattcggatgatgctggagatcatcaactcctgcctgacaaattctcttcaccacaacccaaacttggtgtacgccttgctttacaaacgggacctctttgagcaattccgaactcatccctcattccaggacataatgcaaaacattgacctggtgagtgtgcgcagaggcctctagtctctgttctcttattacttatctatgacgtcagagccactgcgtagcccaggttgtcttcagactcagacaagactcatcatcctcttgccccagcctctgacgcactgggatctgtaggtgtgggcgccacgccaaccaagactcctttctgagtgctgaaaggaagacgttcagtccagccaacttgtcagagctgtctaccaacagggaatctctttgggcatggactgtattttgctcagttgttttctctctctctctctccctccctccctccctccctctctctcccccctctgtgtgtgtgttaaatatccacactcaataacaaagtttatggtttctttaatacaatactatattctatcttactgaatatttatctcattaatatttttctatgatatggtcaactctgaaaatctttttttttttttttaagacagggtttttctggttgtcctgaactagcactgtagaccgagctggccatagcctcaaactcacaaagatctatttgcctctctgcctctctgcctctgcctcccaagtgctgggattaaaggcatgtgcatcactgctcggcaaatatctccaatttccatatctatcaggcctatattgtagatatcctaaaatatatttaaccattattacattattgtacactttcattgtttccagtgtttcttatcaatttgtaactaatgagcagtttgtaaataaattaactcacatttcggttatataatttggggctctttttgtttgcttgttattcgaggcagggtggctctaacgccctgcctgaaggagactttgatttattgtctgtctccatccatctcttaagtcagggtcacaggtgtacactaccatgtctagcttatcttctggtgtagttttaaaactggaactttactgagtcacaccataagaggatatctgtatttccacaatcagtacatcgcctccttttcttcctcctcctcctcctcttcctctccctcttcctcctcctaacctcgtgtgggctcgcacctcagcaacaggtgttctcatggttgccactgccgtagccatgatgcagaagcccagtgtacatgtgaatttcttctgctgagcctgacattttaggcagttctttatatcctcaccattataagctagtgtcccacatagacttactggtatttgcatacttgagaacctccacgtcacatcttaaatacaccttttctagagaacagagggacaggccattgccaggcaatgtttgtttagcatgcaagaaaacttgggtttgctctcacccctcagttgggagcacagaagtattttttctgattccaaattctccttaactgtggatttaattttcataaactcctgctttcattttgtttaaatgtatctaggtggtttgcctacatgtgtgtatgtgtaccatatgcatacagtgcccaagggggccagaagagcaagtcatagctcttgggtctgaagatacagttggttgggagccactataaccactgagccatctctcttcctcataaactactttaaaaattgatagctattagtattaatgaaaccatgaaacaaattattacccaagggatacccatctcaaattgtccctgccttctgaaataaggtgatttttgaaaactgttgactgtggtttataatttaaggttttatgttgtgtgtgctctggtataaggaaagagtacatacagacagggatgggagatgtagtcccagctctgatcctcaccctcccacccccaccccctgtgcagactgctcctaagtcaaggactagactgctggctggaagctgctttttcccagaaagcagctttatagagcagacttcatgtgacagattcatttctggttcttgtttgtaccctttttgggagcacgaagcacttatagttaagaatcatgacgctcttgagttaaagggctaacaaaaccctttctcgatgtgcattagacactgttaagctgtttctagctcagttccctggaaagctaatgaaggtggaatgtcggctgtgtcaccaagcaacctcactccgatacaaagctatgataggatgacatttgattggcaagctgagtctgcaccgggaagaactataaatatctagtgagaagcaatagtttgggatgtttaaaagtgagagatctcatgaccaagtgtgccctttgtaaggacccagaagcttaaagtgtcagagaatgctggtgtctcttgggtacatattttctaagctggatggctgctccatctacacatactggtctgattctctcacattaaagctgtcattgaggggacagcaattatctgtgaagctaccgcaaggattctcaatgggtcctgactgttatcacagcttctccagggcctggggcaggaggatgtcaagttcaaggcctgcctgcatgcacagaggatgcccgagacagtcctctgtggctgtgctgtgcttctgtccctttctccttttaaatcagtctgctaccaccgtggcccttgacgcttgggacttggatcctgtaaagcatcacctcagagtggacatcccagtggtgaagtagtcctgccttctgtttgtctgtaagtgtatcaagctctaaggagagaaccggctttgttttccaagtttgtccagatctttgcattctaaaaatgtttaataatgataacccttgccagccccagatctctacctctgtgtcatctcattccatgtgactgccatgatgctttccctcctccattctgtcctaattatggttactgttgctgcagtgaaacaccatgaccaaagcaaactgaggaggaaagggtttatttggcttacacttccatattactgttcatcatcaaaggaagtcaggacaagaactcagatagggcaagaacctggagtgaggggctgatgtagaagccatggaggagtactccttactggcttgctcctcatggcttgctcagcctgctttcttaaaggaacccaagaccaccagcccaggaatagcaccacccataataggctgtgctctcccccatccatcactaattaagaaactgcccttcttgactctagctgcatatgtaacaaaagatggcctaatcggccatcactggaaagagaggcccattggacacgtaaactttgtatgccccagtacaggggaacgccagggccaaaaagggggagtgggggtgggtgggtttgggggacttttggtatagcattggaaatgtaaatgagctaaatacctaataaaaaatggaaaaaaaagaaaaaaaaaaaaagaaactgcccttcagctgggtcttacattggcaccctctcagtcgaggtccctcctttcacacaactctagcttgtgtcaagttgacatcaaattagccagcacgcataccttcacatcctcttcctctctcacctctcctttcattccccctttccttcttgggtggtctcttcaacacacacaatggacagatgattgtgtgtacctgcagtgtcttggggcgagtactgcttcattcccagtactttccattgtgatggccaaggtctctgtgtatttctgacagacagctaacccagagccagaaactccttgtggtcacagatgtgctgatgagaggtctttgtgagctaacacaatttcagatgctttagtttggaagctctttgcttcttttctccttgtcttcatctttgctcttcttgcacatttgcatagcatttgtatgtcttaatcttcattacacaacaaacctctgaggtgtattcagtttaatccttgatttgcagataatggaacaggtttagaaagctccctttgctcacagacaaacagtgaagaaatgatagagccagagctcagggtcagatgctccaacgataaggcccggcctgctccccagccgccctctgcttctccttgctatgcctctccattccctagaaccatgtgaggtaacagtacacacaacctgaagctcttactgtttcccctgtccttcaagctcggaccgtacagagtcccatccatatgtatcgcagtagtgtggaaagagaatgtctctgcgagctggtcctggtggctcaagcctgtgatcccagcccttaggagcccgaggtagaggatcacaagttccaggccaagctgggctatgcgccaaaaaggaagaagcccggacctgagggactttatcctttgtaaggacatattcaagccatctgcagatgtaaactctagccattcctaactctgcattttggaaaggatgcagagcagaggggaacgagcagtggccttgctgccgagcacatgcatggaaacaagcagggtgagcattgggccgcgcagtgcttgcttgcctgttatggggtgagagcaactgtgcagtgactgattcggcagcatacagcttttcagttcacaaaatccacttcctatcgagagcactctgaacacacctgaacaggcctcgttaatgacgttcgatgctgatctcgctggctccttctccatcccctggagggagacagtccttggagagaggggacacggctggtgtgaagtcaccctgccacttgaatccagctcttgtcactctaaatcccatgtcctcaacatttcctcggagaaacctaaggaagtctcaccatgagtaaggtttccaacaatccaacaaccctgttagatgctgtaatcagaaacagtcctgagcacagtgggagtccagcacactcaggaccccggaagctgtaccagagcatccctcctctttactcttttgtactttacctctcctccctgaatacggagccaggctcggccaaccttggctgctgtaaagggttggaggacaggaggagtctgctgttagctttagctgatggagttgagaactggtatttttcagtaagattcggtaatggctgagtagctcaggtgggaatggctgtccttgagcacctttaatgtctgctaaaggaaggggatgtgcttttcagatgcccagatttacatcacccactgaatacagtcttttctgtccaggacagaagacggtgtcatctgactgaattaaggaacagaatagagcagttaggacaccattacaatgaagacttgagtaacttcctaagtagccaaggcaggaaatgcctgaaagaccatgctaatctctgcgtgacgagtttacagtttacattgtgtttctggtcctgaccatcttgctgcactccagaccagcccattcagccgtttgacagtcccacaaatactcagttgatcgaatcataaacgtttattttctccaaagagtgaacacagggctttcttctcttcagtttttccaaccacagtaaattgtgtcagtatctatccagttgtttaaggggggaagaacagtgtcataattggggtttcactgctgtggagagacaccatgaccaaggcaactcttataaaggacatcatttaattggggctggcttacattttcagaggttcagtccattatcactgtgggaaacatggcggcatgtgggcagacatgatgctggaggagttctgcatcttgatccacaggcagccaggaggagactggatgtcttgttttgtttttcacactaggaggagcttgagcataggagacctctaagtcccccctccacagtaacatactttctctaacaaggccacatctcctaacagtgccactcccgatgacactacaaacatttgagtctgtagggaccattcctgtccaaccactgcaaggaggacaggggaacgggagcaaactggaatggaagttggaagtcgagatttataacgagtggttaggaagctctctgaggaggtgcatttgaagcaagacttggagaagggcatagcgagccctgttgctgtctggacagattgctcaggctgagaacaggggtgaggtgaggtgagggagaattgtttgggaaggaatgggagaggatgtgtcgagaagatggataaggccaggtaatagccactcctttgtcagaaccctctcagctccttaattaaagcgagtggagaccttctatcatatgataaactatacctcaatatatatactactaaaaaataaaattcatgaaaggggttctgcctaagatgttgaaagatatctactcagcaaatcaaatgtataggaggttttttgttgtttggggctgggatgggttggttggtttatgtttgttttgtttttatatatcagggagctgaggtcataggcaagcaggatgcctggatctccagaaagaatagacacgctctcccactattctctaaattaaggtgagatgccagggctgggtccatgtggcacagcatagaaggactagaccactgctgtacaagtgaatgaacagaagccaagttttgtctgaggataaataagaatagcctaagatagcatgcaaaaccccttgtgccattagaacacttggttactaagaaaaatggaagaaaacacctatttgggagaaagtgtcaaaagactgcattatcctttaagaataccattagagctatctgtctgtcacaaaactcaccctagggttatttggctgccgtgaaaagggggaatggaaacagggaaaatctcacactggacccttggcatacaatctccttaaagtcatagtcttaaagtagcagggccagggtaactgctttctgccactagcctagcaagcgctaagtcataagggatggctctccgctgctgagaaaggatcaaaagcacatacacggataaccaaaagcagacagggagcaggtgctgctgtcagaacctgcagggcctaagagaaggctcattaccattggatggtgcagtaggcttgttaccatcggatggtgcagtacactgaaaggagccatagcaaccaaagtctcacatccagtcgcatccagcttaccctctgagtaatcgctcatcctcaaatctggcccaccgtcaaggccacctcggtctctacagctctctgcacagtgtccagggctcaacacagtgagattcccaccccccaaaaatcaagaaacagcagaatagactcagtgagtgattcagatgttaaaactctcagccaagcacttacattattatcattaaaatgaattatcattattgataattgttatattttatatgtgacatatattgtgtataatatataagattatattatagtatgttatattttatattataattatatgtaatataattagtcataacaattgttattgattataaaattataagtatcattacattaaaatcattaaaatgtctaggacaactatcaagaaagtatgacgcacacacaccccaccctaatccagactgaagtgtggcttatacagcctgtgaacagatatcatcatctatagttttaaaaagaagaatgtaagagagaccctgcattctgactcacagagcttgggatactctctaccttgtcctttacagaaaaagcttgccaactcctgacctggtagaataggtgacaatgtgtataaactgctagtaatattttcccttgtatatcaaatagaatgctgtgccagagaaccacgatgccgggctcgtcagtagtcctgggtgtagccaaggggctgaagatgagacttttaaaaacagatcactaagagtaatgctaatgaacacagtaagaaaggagtggaaaatgagagtggaatacccaagagctatgaggtgacattagacagtccaacatccgtgtaattggggtgtgtcagaaaagagaaagaagaacagacctaagaaacaaaaaggcatcaaagccacagatccaagactctgggagcactccaggcagagtcggtctgttgaacaccctcacactctttaaatatctaaaatgtaaagaaaagaaagcatacagacttgcgtgcagttaaagagcagcatcgtagactcaagccttgagaacagaggaaggcaaatggtaacagaagtctcccggtcagaaactgagacagtgaatggcactttaatgcaatggggatgacatcttggtagcctagaacctactccacagagaggacagagtccagaaacatgtggaggtgtggtcagacagagaaagcctgctgctgttagatacactgtaggagtcctgcaggaacttaacccgagcaaagagaccacacttggcaaaaactcggctctacaaaaagaaggcaagagttcccaagtggagagtggagacgccacagggttgcgcctgacttcgattccctagcacccatgtaaaacccagatgtggtggtacgcacctgaagtcccagccctggggagtggcagagggtccatggggctttgctggaggcctgacttgttttctagaacacacaaactctacagagttgtcctctaacctccttctgcataccatagcatgtatgtccacaacacacatcatatacacacacaggcgtggggggtgggggtggggtgggtgtgcttttaatttaaaaaagaaagaaaggaactgagatgaggattgcaagttccaggtcagtttaggacgcataatgagaccctagtttttgattggttggctcattgaattgtttgttttgaaaacatatttggtggcagagcacttgcctaatatatgggaggaaagccctgtgcttggcccctagcaccagggcaggggatttgagtcacctaagtctgagctccatttgtcacctaagaattggagacatagtgacactagaaggagcgctccagccacatctgacactccatccgctcacagctctttcatccgtacataggaagagatttttatcagcctcatagagtcactgtgggcatttgataaacagtatagagagactgcaaataaataaataaaatccacgtggctaccctgccattctcctggtgacacaagaattcatcaatggcttaaagttcatccagtgtaggccacagagggaacaaaacagacctgtcatcccagctctgtatttggttaagtgacatgtgaaaactcctgcttcagttgtgtctctagtatgagtggtgtagcttccactgagctttgagtgtgagcactttgctgtcttggtcagcaatcccccctgagttgcactagtattccttaagatcataggagggcatattagagcttcatttattcatctgaaaataaagagatttcgtcttactagtggtattgacaacgggctggcctgagttggtagtagagctcttccttgataggatcagctctcacagtgtgccaaggtgaagggcaaaactctgggtagtctgagggaaggaaggggaacctcagttcatggaggaggagaaggaaagaaaaaggaaggaagaaagaaaaggtaaaaaaaaaaattgtgttcctctaggatctggattcagttagagaaatctttgaaagctgtcatatttatcccccaagttgaaagaaatacagtaagatcagcacatgtgacaaaggacagtgcaaaattgtcatctcctcctagagcaggtgccaccttgtgaagtagaagtgagactcccgtgcaatctcacaagaactgggtccatcacctgactaggaaggtgtctgtttggtgctctggattaggcattgagtctcccgggagtggcagcacatacctttaaccccagcactctggagagcctgggctatagagacagaccctgtctctacacaaacagataagtagattagagagagggagagggagagagagaggagagagagagagagatgtatcaatggaccgatggatgaataagatgagtcaactctctccttccataatacaggtttccgagtagatcaccaggcctagcagcgagctcctttacctacggagccatctcgacatcccatgcgtgccttcttagcctcactttatgctcagtggttaagaggtccggctgctcttgcagagggccagagttcagttcccagcactggtggctcatagccatcttgcagatgcatgcagctccaaggaatctgataccttcttctgtcctccttgggcatgtggtacatgcaagcaaaacatatgccacagaatttttaaaagaaatctcttactagctaattctgcatgtagcatgttacataatttataaataaataaaacattgcaagtatatacttttttttacaacttgtactcacagttagtcagtaaagtttgagaatgtctgtctgtcctagcttctggttgactctcagaaggcctgagacatcagttagagggtccctgagcaggcccagggcggccctggtatttcacgaggcttctgatgatctgatgtatttggaagtcactctgtaaatatacaaaaactgtaagcctcggctgtccagtctgggttttagtcataaactaattcattgggtttttttacttcttagaattctattttcaacacgtgttccttctcaatgattttgactaaagaatttaattttaattaatttaatttgtaaggctaaatcacaagaaattcaatatttatgcatttttaaccgttgtgtatatctttgctgcatatttaatttatttttaatttatcattgtgtgtgtcagatatgtgtccatgcatgacactttgagatgggtcccagagattgaactcggatcaccaggcttggacagcaagtgcctttactcgcctagccctctcaccaacccttttgtatactttaagattctaacaagcctttggtaacgtgttttctctttgtgatgtgcctgtcgccagtacttagttccctgtataataaaatcccgtcatatgccttggacactgtgaacagagctttaatcccagagtccccaaaaaaaacctgtaattgtgtttaacacatatgaaaagccaacctgttgtgggcaaaatgagcagtttgtaaagtcgctggctgccttatggtcgctccttgcctgagcggagaggtacacacttgccgatggccagagtagtgtcttctcccagagtggaactgttcctgtggcatttgcacagcatggcaactgtctactaaaacagttaagaaaaatgccactactctccaagagtaagtacttatgagagatatttcaaagaaaacatgaaaacgtttttttaaaaatttgtgttacgtattttacatgtaaaatagaagccatataggaaacaaaaggaagaagttcaacattttaaaatcttcttttacatattttttgggggaagcacaaatatggggatcaggtgacaactcagagaactggttctctctctccaccgagtgggtctcagagatgggactcaggtcatctggcatggtggcaagagcctctacggctgagctgtctcagcagccggctgttcagcctttggaaacatgtgtacattttagccggtctgagtagagaggtcagcagtcttgctgatctgcaacactgtggatgtaatagcactttcctgggaacctcctacggcattctttgtggtttgctggaccgcttggttggcatggattctgcagaactcgggcttgaacccaggacttcacataagctatccgtcgttaagacactagctacacctccagtgccactggcagtggccttgtgttgactttggtgtgtctgtttctgtttctttgtgcatgcgcacaggtgtggagaccagggcaacctctacaccttccttcaaagacaacacagcactttccttccttccttccttccttccttcctttcttccttcctccctccctcccttccttccttcctttctcccttccttccttccttccttccttccttccttccttccttccttcctttgtttttgttttgttttcttttcctgagacagagtcccttagtgacctggaattcaccaggtacagtggtctcgctggccagcaagtgccaggaaccctcttgcccctgcttctctggcattgggattattatcacgggacactacttccggatttcttatgcgagacccaggaactaaactctggatctcgtacttgcaagacgatctccacccatatgagacccctaccccacgacctttaatttccaattagaaatttccagggtcctggactggggctgtgttagcattttgctgcatggttcaggctatatagtatcgccagacggaagcttgctgttgctctccctggtgattggcgctaagaatgctgcagatgagttgaaatcatagatagttcccagataccattttagctgttaaggttcttttcctacatgccctcttctgggccctcatgttaagcttggatttgggcacactgaggagtctgccttcccttcccactttctgctcagcaccgctctaacacaaagaataaacagaaaacagagctgcatggaaggcggccggataaagcctctcaactcacaggatggccagccaccacgatcacagggcagactcatagttgccatcaaaccctgtagagaggccagcagctaggaggtcagataaagcgaggtccagatcccgtaaaagcggaagaaggagggcttgcctttgggtgagagggcgtcaccgaaaatccatttccagcaacttcgtggttcaatctatgcctttggtgtcatgcctgtaatcctggctgcttgggaggctgagacaggaggactataagcattattgataaataataacataggggcaggaaagatggctcaggggttaagagtgctggctgttcatgcagagggcctgggttcacttcccaacacccacatgatggctgacaaccatgtgtaactccagttcctggacatctgatgccctctctgacctccgtggacaccaggaatacatgtaccacacatgcgtatatgcaggcaaatcacataaaatcaaacaaataaatatttgtttacatggctctttctttacaggtgatctccttctttagctcaagacttctacaagctggagctgagctgtcggtggaaagggtcttggaaatcattaaacaaggggttgtggcgctgcccaaagacagactaaaggtaagccggctacagaattgcccgtgacactggctgttggtcactcaaggcacatagagatcagcatccagcaggcatgactcagactggtactgctcaccagtgctcatgtctgagaggctaaatattccctctgctgtctcctgataccaaacccgcagttcagtagagagtagccagatatgcgttcacatcgctgcacaccccaccagtaagccctgcacactccatgagaactcatagttaccgggtatatttttaatcctgtcaaacaaactgatgccatacaaacatcacaaaaggctaatgggcaggcagcggtgatggcgatgccaatactgtggtgtccggtgtttgttagtgcctcccagtgtcatgccgggacctcagcctctgagtgtaccacctcacccgataccctccctactcgagcagccgctgttaacagctgaagtcgtcaggtgaagagaccagcatggaaagattcatttccctagagcattccaaccaggaagtgcttgagctgagtcgagcccaaggcagtctgtccaaaggccttgcttgtggtccattactgcttactgtatgccttcgtacagtaatgggaagaaaagtacttcgtgggaaagggggagatgctgcatctgacgaaaatactgtacatctgtgtggcagaggcactcctgaaagggctgaaagtccacgcctcagacctgaccccttagggcagtgtttctcagtcgtccctgtgctgcgtctctttaacacagttcctcatgctggggtaacgccatccatacaatgatttttgttgctacctggtagctgtaatcttactactgttatgaattataatgtaaattctgtgctttctgatggtcttaagcgacccttgtgaaagggtcttttgacaccacacacctcgcaaagtgtcatggcccccaggtagagaagcactgtctcaaggtgaggatgtttcatatgtcaaagaagataattcatttctcaacttatgatagcagagaacatggtaatgtctgtaggccagaagcaaggcattttgctgcaagcacaggtagcttgtaacgatgaagaaattagggcagacattaagcagaactgttgcccatccagtggtcagtggtgtcgtgaaaacaaacctgagaaaggcgttttcagctcggcatccctaacctcctctctagtctgcttctgtggcctcctgggctacagaggagagccaagatccttgcctctcctagaatctcctctcccccaggagtctaccaaggccgatagagcgttggagggcaaaagaggggaagctattctccagagacagacagacagacggggacacacacacacacaagcacacaaacacacagagcttttagtcagctttccgttactgtaacaaaatgcctgaagtaattaactgagatttgttgtagcagtttcatcctgtggatcagttggctctgtttctttgtgctagtcaggaaacagcatgttatgacagaagctcgtgacagaactgagttctgtgcctccttcaaagccagggaacagaagaaaaaaaaaactggagtgtcccctcgtaacctgcaaacctacccagttcctcactgtgtttccacttgcgcatctgccccacgagcaggagaccagttcctcagtatggggcctttggagaacatccaaactgcagctcctgtctgcagtaggtggctgaggttgtcagtggcagccagagatgctgacgtgtgcagcagctcacccagagctcttcagtgcctctcgggaagtcctgtggacttgagtagcttctgtttaccctatcaaacctgtctggagaagtagaacccgtgatttcagtagatagtgatttaatatagaagctcaaaatctcagagaagcctgaaggagcacagcgaaaggaagccacagaagctgccaggctgtccccaccagtgacctgggttgcctggagcatcaaagtgggggtacaggaacagctggccaggcttcagccaaagtcttgacactgggtttcctgtgccgatgagggtaaacacgcacatacccccttcattgccatagcctaaggctaagccctgcagagccctgctgggaaagtcactgcccgactccatagaatgaaaggggcggagagtgttcagcaacaccaccaccaccccagacagtgcagcacgaggtctgtctcaggatgctgtaacgcatcatcagaaggagcagcgtgagtctgctcagacagctgcagactctgctgggggttttatgaatccaaggagccaaggagcaagctggggtctctagtccagaaggagaggacaaggttacagttacatacccatgtgtcctttaaacaaaattgaagttcaaggtaagtaaatgaatagcaaaggggttgttttgtgggttttttttttttttttttttttaccgtattctgtatttgacgtggtaaatgtacatacttacattttagtgcaagtgttcatgtatggggtcagatcagggtagtgacgtatctgccacctcagacatttgctgtttgttctgggagcattcacaaattgtcgctacaagctgttaggaagtgttcacttgattagtgccaaccatagtaattctcctctgctaaacatggttcaccccacatttccatcagccatcgtcctcctacacacccttgctgggctatggtaagcactcttctccactccgctgctcggcggtagatcatgttgtactaccacatattagtgagaacatccaatgtttgtctttgtgtgcctgacttctgtcttccatccatgttgctgtaagtggcagcattatttatagttgagtaatactccattgtatatgtgtaccatatttccttatccagccactcatccacagccaatcaacaaggttgattctgtttcatgactatcgtaaagaatgagaaagagaagggcaagtgactgttttatatatgtacctgtggtggtttgaatcggagtggcccccatagactcatatgtttgaatgcttggctcatggggagcggcactcttaggaggtgtggccttgttggagtaagtatgtgactgtggggatggttttgagggtctcctgctcaggctagtggggcagtctcctcctgctcctgtggatcaagatgtagagctctcagctcctcctccagcaccatatctgcctgcatgctaccatgtttcctgtcgtgacaataatcgactgaacctctgaaattgtaagccagccccaattaagtgttttcctttataagatttgttgtggtcatggtgtctgttcacgcaatagaaaccctaactaagacaatgccaatactaagattgtcagatttcttagttagggtttctgttgctgtggtaaatctccattatcaaaagcatctcggagatagggtttgtttctttttacagcttgtagtccatcatccagggaggcctagtcaggaacctagaactggaggcagaggctgatccagaagccctggaagactgccccttgctggctggccactcatactgcctgctttcgtagttacacagaaccaccagtctaggaatggccccacccacagtgaactgggccctcccacatcagtcagtcaagaaccatgccacaggcttacccacaagccagtcctctggagagtccctcttcccagctgactctagctgtgtcaggctgacatcaaagtgaccagaacactgagtctatttctagttttcctggtatagtctctgtactgatttcttccacactgtgccagtctttttaatcttttgacactgtttctcacatttctggcaaatgtaacttgtcagtaaattttagaacttaaattccacagtaatagtaatgctaagatacttttctaactgtttttatggctatgagttgttcctgttgtcaccacagctttctagatgatgtagctaagacctcaagacattgagtaatgttcggatacaaagctgggcccagctacatgctaaaccaaagcagcctttctccaggcagtgttttcaccctgtgctagcctggccactggctatggtttccggacgcatgagttagggttagtgtgagattctatttggtattatattagtgagcccaagtgtgagccagagacgcaggtgtggttacggtgaagagcctgtgaatcacgttaagtgaggagggagagggtcccgggagatacctcgagcagccactgcaagcattgtcacaggtgaatcaggcgtttcatcttcagggtggtaagtgagccaacagaactcttattcactttaagaaggtgtgtcttcccagccacttcctgagacatacctgcagcaaagtctgggggcacataaaaccatccggggccccgggggctcgaatcggtggcaggggagagctcagggaagacgtcctgtgggagcctggcaggcggctccgttggtgaagctgcttgctgcacatgtgtgaagatccacagcagccatgtggaaggctgggctcagagagaagtctgcaaccccggtgctggggtggaggacaagtggaccccagagcccatcggttagctagtctgaccaacttcgtgaactccagattcaacaagagaccctgtctcaaaattaaggtggaggggctggggaaatggctcattggataaagcacttaccatctcaatgtgaggataggagttccagtctctgagacctgtgtaaatgttgggtgggcatggtatctaactgtaattacagcatttacaaagtgtcagagcagttaagtatccttagagcaagctgtctacctagcctagctatgtcggtaatccctgagttaggctgagagaccctgcttcatgagtaagacagagagcagaagggcagaactcctgatgccaacaccaccatacatttgtatatacaacacacacacacacacacacacacacacacacactcacaaagtcttacgatggaaggctgctcagatttataccaaagatttcttctaattcttagagcctagaatcgtgtcttttctgcttccatgctgaattctgtagagcagagccctgttcccagcagataaagtctaaagttactctgggattctagatagctcatggcccctaagcctccttgcccggccttcttcctccccatcccccttgctccaggcagctctgcatctgtgtccttccctggactccctttgtgggtttgctcctacggctctcatctggaggtggcatcccttttaccttggccagtcacttagtcagatcctgaacatcccctcagggccccgctgaatttcaaaggatgcctgaagacttcccttttattcttgtatggctgtgtgtctctcagtaaaatgcccagagcactgtatccccagcatctcgtcctcttctgccctgttttaggtatttaatgtctttcccctccacagtagctgatctgcagccccagctgcctagttcagtccatgaagtgggtggaggggtgagccggctgtgtgtactctgtgtgggaagtggggggccgttcccatgcaggaggtgagaagtcaaaaattctgtacctttagatgttcttttcaaaatgtattctgccatcttctagagtcttaatacctgtaactgcctccccctgttctccacactgtcctagccacgatggctacagcagaggacaagaaaacaagccctgctcccatcgaacaggctgtggagaagactcactctaagttaaaatgtaaaacaaatggctgtcttagaaagtagtgactagcagagaagtcaagggcagaagagggtgggcaatgggtgggggggttgggaagtgtggggacggggtggggcggagtccgtggcagagtctgtgctgttctcgttgctgctgtcattgtgtgttttatttttacggaatttacagttacagaaaagtaacataagtagtaggcgttccaacttaaaggcagtccaggtaaaacgcttcctggatctatggccaggcacagtggcacaggtctatgaggagggtccttggtgagctccacatgacagagctgttctctcacaaatgaacagcgtctttgatggtaacaccaaggttatgctctggcttccacacgcatgcacatacactaacacacatatggaacacacactcacactggtgtcctacggttaagaagccacgcctcccacatgcttgtcattctctccctgtacccaccctgctctctgggagcctccatgttacctgccctatccccttagtctcctctttcgtggtattggtctgtattgtattcaggttttcccggtactttctcctggttctgttgaagttgcttgtatatggccagagcctccgaagtgttcacagctgtcgggagtgtggtctcttcaggacacttctcctgaaggtctactggcatctccagtgaagcgaacagctgtctgttcctttggaaatgttagatgtctctcctttggagtcttgccctctgatcttaccatccatcagcaggtctggctgacaacagaggaacgaccactgtgctcatttgctaaggctgactctgtaggttttagttcagtgctaacatttgtttatttttgcccagatttctctagctttggccagtgaactcctggggttgatttccttgtgctttgccacaccccactttgtggactatgtggaatgctgcaaattagtctcgtatcttctgtgccccaggttccagacagagctgggcgctcagctaccttttgccagaccattgcctcctcccgctctcccattaacagctaatgcattgggttctgcctctgccctgcccaggcacctttcttgtttgtctcttcctggtatgccccagctcctttctttcacctcacccttactagctgtgtccttggtcccttctgacacagcctgatctgttttctacttcttttaataaacactctttgcccaagaacccttccatgggccatagaaaatagagaggcttgacctataatattgaccttagagcaaaatgaattacagagtgcacgccacaatatgtgaatgtattgtctttttactgtactgtactcaggaataaatgattctttgagacagtcacatatacatggaaatgcagccttttatggttatggccagtagagaaattagttgatctttgggggttccagagaagttaacccttgtttagagtaatatactattaaggccaaggtcacacgtaaatcctttaagtcagacaagtagttttgttctggaacataggggaaaaaaatgtacccctgggctcaggctgcctgcactctgtggttatagaggttggaagatggatggctccgtttaaaaacagaaaacaaaacaatccatcacccgcactagaggggaagccgaagttacatttcctcgcacgtggtgagtcatgccctgttggtctaaatgagaacctgtcattaccacaggtgctgctcagaaagggctgcttagcttcagagccgaggcatccctccattgctgaatcatttttagggttgagtgtttataataaaacaaatcacctaaaaccttgagagtttaattctcgggatactgcgatgtgtgacgttgactggaaaggctgtgtgcattgaatagtcttggtataccacatgcgcgtgctccgagtcatttagggtcgttggcaatacaatatcggcatacatgtgataggttagtaggaatagatttccaaatggaaatactattttaataaatgctatggaggtgtaaatggtgtctacatggtggtttatcacatatattaaacactaaatttcagttttttgacgaccttggcttaagagaaccatagaactcaggaattttctcatcagctaggtagatgagcttgacgttttgacattcttccttttattgaagaatgaaaactaaatctgtacaattactctcccaatattggacaagtagactctaagatctagagcacggtaactggcattcaaccaagtaagatagttttcaatcaaatgttactgggcatagtcttctaaactatttgcttattagtgtgtgggggactgcatactcattggctaaatctgtctatacagttaaacaagcgggctggattaacatcagcctacacgttctcttcactagtgttccatgagaaaggcagctcgggctctttgtggtctccggacctcccatgtaagcaagagactaaacagcaagctctgaaatcctgagttgctcgtttctcttctagggtttaatagacataaagttagtatgcccttccccagccacatctgcagccatggctcaaagctctggggctctgcatcctcggctcggcagggccctggctcccattttgctggctgggaacagtttgaacagactgaagggacagaagtcatccggccccgttgtgctcactgccactacagcttgtatatgagtgtgtacggttcctggttgtccctgtcatggattcagttaattatctgtgttgttggaggattaagaatgtaacctaatttgataattaggtgatattttcaaggaaaatgcaatcagaagataacttttcttttagggcaaataggaaattgtggagtaacttgataagtcgtaattaaaagtggtagccagctcacactaaatgaagttactttgtggggtggggaagtgtttgtttgtgtgagtggaccacagtgcatgtgtggaggtcagaggccaacctcaggtgtcaggcctggctttcttccttgtttgagacagatttccttactgtttgctgatgtgcacaccaagtgagctggcctctttagcttctcatgattctcttgtctctgcctccatcctcccgggagattcgacacttagactacttgtccagccttttgctggttctgtagcctgaactcagttcattgggcttgtccagtgagctctttccctgccaagcaggctccctagcctgtcagtgagttttaaaagtcttcatttttttaaatgtaatttttagaatattttcattgttgtcattaattgcataaagagcgtctctaatacacacacaaagttggattgatttgtctggagggtatcttattaaatttattcatctgtgagtgttttgcctacatgtatgcattgtatgcttatgggacatattttatagatttttaatatggtctttaaaacttctttttcctcctgttgagaacctcttccttctcttcccaaatgtcacttctgccaggtatctgattcctgtaatggacaaagtacattataacttatgagtgtggtttgactgttcattctacccacactagtcattttacactgcatgagcacagtggtgctggctatcgtggaggagggaaggtacatacaacctcaggaggccccaggagagccaggtacactcaccagaggtgctaacacaagggcagttcactttgtcagatggtagagggggcaagttctggaaagaagaggttactggactaggcagggagaatgaaggcgagacaggcttgaccttgtctgtcttgaaggattggaaggttttcataggccgaggtaaagaagagtagcttgcaaaggaaacccgtgagagtgagggacagtccagggcactgtagcctagtggccaacagaatgactcatggattcccctgccaagtcagtgtggcttttgtcacttgatgatacaattatgtccttagactagtgcttttcaaacttttttaactgtcactgccagttacacacacacacacacacacacacacacacacacacctgtaccatgtgtagcactgtactcatttgcatacaactaaaacaaatttgtgtaaaacagtactcattgagtgtactggctggttttgtgtgtcaacttgacacaagcaagagtcatgagagaggaaggagcatcagttgaggaaatgcctccatgagatccagctgtagggcattttctcaattagtgatcaagggtgggagggcccactgtgggtggtgccacccctgggctggtggtcctgggtctataagaaagaaagctgagcaagccaggggaagcaagccagtaagcagcaccctccatggcctctgcatgagctcctgcctcaggctccagccctgcttgagtcttgccctgacttccttcaatgaaggactgtgatctagaagttaagccaaataaacccttttctccccaatttgcttttttggtcatggtgttcatcacagccatcgagaccctaactaagacactgagtatgatgggctcatgaccctgtatccttttgaattgatggccaggcctactcaatggatgtaaaggctggctgctgtttagtgtcttagaattttcaaaatccatgatagttttaaaatgtggtcttgagaggaaaggtgcatctccatcctctgatttcaaaatgcagatcttcgggcttcatccagacctgtggcccagtactgctcttgccaaagaccaagttcagtttccagcagccacacctggctacgtgcacatactccacattcaggagaggttacaacactccaagttaccattgctgcactcaggaagaaatgattgaggagggatggcttagttaaggaagtgtgagtttaagccctagatctgcataaaaagttataaagtaatgtatgtttataatcccagggctgggattataaacagtcaagatggtctctggggtttgtatgcccgccttaccctactttagtaagttctaggccagtgaaaaatctatctccaatacacggtgcagctgtggggatggcacagtgggtaggagcacttacagcacaagcatgaaagccggggttcagtcagattccccaaagcccatggacagagctgggcatggtggcatacacgtgcctataagcccacagctgtgcgcatatgaagacagcaggatggctgggcttggtggccactgaccaagctctgggttcagaaagatcctgtctggagggctagagcaagacacccagcacccttctgcggcctctgtgccacttcttctaaggaaccacacccaaagctgttctcctgccttcacacataggtgtacccacaaacacacaccaaaaaaactcaaaggaactggctagtgaatgaagtcaactcctggggatttcagcaaacacaactacatatcaattccatcccagtaatttctgagagcaggacctgctggagagcatagcagaccattatgatatgaacaccagacacacggccatgctgccttgtctaggaacaaggccagtgctgctggtctctagccgtgaggcttttgagagaattctatttaataaagtcacttagagttcttctaatctcaggtttgcaacgccctctcggaaatcttgatgacattttacattttgagagacccctcccacatgatctccacttctctgccctaaccaaaactaggggcgtgaaagctggaccgacagacagccttatggactgacacacagatggaattagaggtggttcagcttccttcccacaatagacacctattgtaattctcgctccctcttggccacacctatttcatcagtgagctgggcactatactcttgtaggttttacttcctatttcctttgacagaaaactcagtttcccaagtccttccctgccatttgtaccacttatatcccatgatgccctatgtgggagtgtggaagtatatgtgggggtggggggtattcatctcccttcatcctgggttccctggtgtgttgtctgtttctaaccccattcttacttctccgatacactgccttgcacagaagactcactaaatactgctgtatggttgaaagtcaacttgagaattaagttactactttcagatatggtaatctgagaatcaaccaattaaaagcctccaaagaaaactgctacagtgtgtgaacaaataactcaaaggaactggccggtgaatgaagtcgactcctggagtcggcactcatttagaagggagatgtaggctttatatgattccatttcctcagcttttatcctggaaccaagtatcatccaggtagtcacagcagggaaaggcaattgctcttaatgaagaactcagactctttctggcttaggaaaccacaccaaggtcagcctgagagagatggatgccgtggagagaggtagactcccaaaagtcagccagacggatcccagattgtgttcctccagatgtcaccctgactcctgagcagtgtgtaagacactgacctaaaacagccatgccaaaggccagaaatgtgaagtagacaaaaaagtgcagccctagagatctggaagagtgaatctaggcacagactcaagaaggtctgtcctactgaaagaggggaaacagcaagctgtgttcttgtctcttttgtcccttttgaaagcttggtctaactgtagtccgtgcccacacagcagaatcagggaacacatgggaaagtggcagcctctctggcctagagaatcattaagggaaggaacatagggtctgaaaccctaagaatcatggaggaaccacagaagagaaagaggggttcctaagacccacaaccatgactggaccgtgatccacacctgcagaatcagctcttatgtcccagtcaaggatgggggagggctgcccagaaaccagagcctgctcaaaatacggagactctcaacaacttaacattaattttattcaggatacagtccaaatttttccgacatcgaaagaatcaagaaaatggaacacattctctacataaaagaaaatcaattaagctccaccccaagatgaaccagatgttagaacttacagacaaggatctctgaagtaactcctaataacgaacgcttctccattttttcacatgacacatgtttccaatgcatgaaaatttcagtagagagatgagatgtctcaggcaagcattggaaactgtacacaaatcccaaatgggggaaagacagaggtctacagaccgaaatgctaatacaagcggttagttacgcacagggaacctcatgcggagatgcgctggcatcaaaacagttaacgagcgacacagacacaccaaacagagccagcaatccagggtagcgcgggtctgtgggagcaaacaacaactgggcggttacctgccctgctctcacgggtgaccacagggcctcaggaggctggggcagactctttaaagtgctgaaagaaaaagtgtgaacccagaattccctgtcaggtgaggagagctctcaggatgaaagccagctgaagactggagggaaggagggttacaggcggcgtgcctgctgctgctgtgtgatgctagagggagttcttagggtgaacagatgggaatttgaattgtcaaaaaaggactgtttgtaagaaatgataaatgtccaggttcctgcgagtttactgccatgtctgtctagttgataatgtttgtagaggaactgtatgtaaaaactacagaacaaaggaggggagaagagggatatgggcctgtatggttatgagtttatattgagtttatatttcacatatttcacaccatctttgtgaagattaaaaaagttacagatctgttttgtaatctatagcagccgatatgaaatcgtataaaaatgaataacccaaaagacaataaaatggctccgtaggtaaagagcctcactgtgaaagctatagtgaccagcgctcagtcctggaagccatgtgcaggtggatggagagagtcgcctcagagtcatcctgagttatgccacggcacacacccacccccgcacacactactaacaataataataataataataataataataataattcttaaaagccaaccaaaaaagtcgaactgtaaagaacacttagatagtatagggtcacccccacaaaggaaggaggatagaaatgaaggaacaagaaggcagctgaaaataaaatgacggatagaactacggtaaacagcagtagcccaagcgcatgcagaaggaagagttgtcacgatggatgaaagaagacagcaataagccacctgcagaggatgcaccttaaccataagaactggggtgaaagtcagtggaagaggggctggagagatggctcagcagctaagagcgctggctgcctgctcttccagaggactggagctcttccagacctcacaggcaccgtgcatacaagtggtgtatgtacatacatgtagacaaaacaaccatgcacataaaatgaaacaaaccagaagagacagaaagtaaatggaaggaaagatagaatgcagacaagtgagcaggaagccagtgtacccagcacatcacgtcagagcaactccggttccaagtgctgtgtggctgtggcaagtgtgcgtgtatggtaacacacttcaaaatcgtggaacaggaacattgacaggtgcgtggaacagatctgcccactctccttattggagattcgcatccttcccacagcaactgataaagaactagaccaaaaaatccagcaaagacatgagagatctgagcggctgtcagccacctccccctgattggcatttatagaacatcctacggtggcagaactcacttgattttgaatgtgtatggcacatttacctaagcataccctattttgagctttatgactaatttccgtaaaattagaatcatcaaactagaattagatcagaaatcgataaaatgccagaaaaggcagtgggtgacaggaagcgcatgtgcagggagtcagagggagtctgttagcacagcacgcctgctcaaagagcatttatcaggttcaacacttggaattaaagaaaatttgtttgttttctgagacagttttctctgttgaacagtcatggctgtcatggaactcactctgtagatcaggctggcctcaaactcaaaagagttcctcctacctctgcctcccaagtgctgagattaaaggtgtgtgccaccactgcctggcaaaattagtggattttgtgtggattagcggactttgatatgcaaagaggaggcttagaatgttttatcatgattccctaagaacccacagcctgggctctgaagccggagagctggcaaacactgcccaccaggaacgtggtttctctgcagggtgccaggtgcctggccaccgaagagaaaagaagcacgcgaggcagacaggtgacagactcagagtgtccttcctggtgtccttccccacagcccactttctgtaacagtagaagccgggtaaatcccagtctcaggggtgagtgctttacggtgagcagcgagcttcctacctaagcagagggatggcctgtgaaggagagctcagggccggcagcagcggtgcgagcctggcacgggccacccctgatgttccagggacgccccggcaggaactggtgtcagagtttcatagtaccttcaagggttattttcaaacaaaatacacacttcacaaatgtcttaaggatatgcgcactctgtgcttcataccgttactacatttttttttatgcgataactacataaaagccagatgtctccggagaaatcattttgcattaccgctgcctctaaacaaacagcccagcagttgctgcgggaacagagctgtgaattacttgaacgactgcgtgtttcaacacacgttcctggagttcgttttgggcatggtctctgcagcacgaggagtaaatcagaagtcggaagtgacttgtgtgtctagaagaggaacagcacgcagagtttccttaatatgtcttccagactcagagttaaaaacataatatttttcatgtgatctcggctgcactcacagtcatgtttaggagcatgtactcccacaagaggaaacacgttcccagagtgtgtcctgggaactgaaagctaagggcgggttgtttgtgtgtttgcttggctctgctgctgtattcagtgtttcctcagtgtcgtcgtcgtcagcgatggccaccatcaacacaggaaatatgtgctaacacgcgttgaagtgtgtgtgttggggtggaggggctagagctctttttagggtagatcagacctttgccagaacagagcaggaagtaatcactgtcctccactggaaagcacttcatggcgtgttttctctataaaacagagcaaacgccctttgctccttcagcctccctagcccgcaacctcagtcagcacctcttcttcccaactcgccgcagtcaatgtcctgaattcttcatttggagacgcctatggcactgcatggcattacccatgtcccccaccacagccccgtcactgggtagaccggacacctctctgtagtcttactcgtcatatcccttgtgagcgtcacaagaaaggctccagaatgtgtaccatgctctggaccccactggttctctaagggacatagctgcttattgtaaccatgcatgtctgtaaccctggtccttgagtgaagcctagagaaggagcgatgcggagatgagtcattgggtcaagtgctcactgtgcaagcatgagaacctgagttcggatctccagtgcccacacagaaagccatggagcgcacacctgtagtcccagtgcaggcttagggcagcagaggcgggacgatcccttgggtgtgggttaccaaccagccagtgtaactgagcctctgtcttcaaaacacgaaggagagccagcgagatgatcagcaaaggagggtgcctgccgttgagccgcggcatcctgatttcaattcccaaagcacatagtggaaaccgagctgtcttctgacctccacatgcatacacatgtgttgtgttcgtgtgtgggtgtgtgcatgtgttatgtatgtatatgtaaatttaaaaactaactttaaataactaggccgagagtgatagaggaaagcatgttgttcaactcctgaatgtacaaacacagacacgtgccacctgcccagtgcacaaatctctctcgaatacacacacccctgcctgcagagaagtgtaaggaaagatggtaggtataagggacaatcccacactaggtccagcttgtctgcagctagcgtcacccccaccacaggtcccattgcttggccctcacaggggatgattctggacttaacagcagcagcacaatcctagaaggaggaggagacgctgaggggcttccccttgctgttgatgagtgcctcgtgctgtggctgcgggcctgatgggacctgaagggtcttgccctggccgcctccccagtggctcgtcacagtctcctgcttggagccatgagcctggctacatcagagctttgctgaggccactcagcgtcgtcccctggagtcttccttgcctgcctccctcaccgcagtccccgtctgccttgggaatctgagactgtctgaaagcagatgcattcagaagaaacagagaccgtttggagttctcttggaatttattatataagaaactcatgtgttttgcagaatatttacaaggaacgggtctgggcattaattaaaggtctcagattcgcttttggccattaaactcagtagccactctgcagggctgtgtggactgcccttctcagattaggagactgtcgaatcctcgcccaaggaatgagtcctgttttaaaattgagccctttcgtttttccagttttgctcattttataaattttcaacactaagcacaattaatatacatgttcattattaaagttggaagtggctcctaagcataatggaagttgacttttgctctgtgtactacgccagcagaactctgcagtgtagtaggcaggcatcctcagctctactgaggtagctgctatcctcagttcacatgactgggtagcatctcactcccatgagttctgaataacccagaaacttcctggttctttggtcttttctttttgttatcaaattacttatcctaaataaagcaaatttaatactgactccctaggtctaagagtctgcacctctcagcattaccaagaatataaagtagaaattaaaaaaaaaaaatagtttgtggctacaaagcagtggaagtggatcctgtggcttcagaggaagctgcaggctgccacggttccctcctctgctctgtgcatcggtttactggtgaagagagccagctttgccctccgtggatcgctggtgcatcctgggtgctgtggggagactaatgagctgcaggcctgcctgcaccagcaagtcctcgagctccagacgcactctctttactctttataattaagggcctgaagccattatttcagacttcccctcctcctgccccgttgtgctcacttggctgttttatgggctatttgtgcgtactttctaagcaagcccggagtacacatgcaaaatctgtcagtttaacctctgacaggaaactattcagatttggtaaatacattttaagtgtatgcttttaccagttctaaattaatatgaaggtgttcttccttttttaagtgtaagtattatgtgcagaactatatttatgggaattggtttttagtttgcttaaacccaaagatactcattttcagcttcaagtagaaaaggcctcgtccttacggagggtgggtgttcacatttcagataaatgtgtttcaaaaaaactttgagggactttctattcctcagaactcctcagactttcatttgggactggatgaggggaggattaagttaaaatggtgaagagattaggcctgttcttctcatgtcgttttataggctggtgtttgcagccctgcaagttaaatgacaggacacccatgtggtgtcctttctgagaggagccctaaccctcctgcttcggctgagatagagtgggtggagcctagctgcttcctgttcaccgggctgtctggccccgcagtgataagcagacactcactggccacttgaaggagactttcagtaaagttcccaaacccacggccagctttctcctgtgaaccatttatttgacaggaaatgaaattggttacagggtttctcacattgccaaacctcactgacaaaatctggtttcttccagagcccaggagcagcgttaactctttgttgttagtaaacacgtctggcctctgtccatggagagccgcaacagtaccaaggggcacaggataggagtgcgcccaggggactggctcacagatgcccaaagatgacccctggagaatgggattttacttcttattggcacagtcatctctcagaataaagtgacattttcacaagactaattttttacttccaaaagtgaaagctttcaaccatgacacaaattaccgtattgtgaacagagcctggttgcttagtccagcaagcagtttttacactctgcgacgaaagtagaagaaacagaaataaataggcccatgtggttacagggcagagaaactacttgggtgagtgaaggttaagttactacaaagtgtataatctagttcatatgtttaaggaggaactaggctaaattacccaaaatattctgacgcatggaatcagttcgttttgtgaggcagaactggtggctcatagcatgccatggtaggctcgcctgctcggtgctgtctgcagctccagcctcctgggtttggagtcagcaggcccagaggtaaggcactgcatgcatgtggcagtcattaggatggtggaagtggttgctggctaattgatagcagtagcagcttgagacagccttatttaattttcaatagtcctatgacaggacgctataaatgggtcgctttgtagtctgactgactcccattgtcctctgtgtgccattaaatatgagagagttaatatatgcacttgataaaatttaggaatgagtttctctgcccctcttccctcctttggagtctttccatttgatgtttgtcctggttaccttggactccaaggtactccatagttactcccagtgtagcctgctgcccttgtctgccatggcgcctgtgagctacaaatgtgcttgtgatcacaaacccaactcctagcctgtgccagctggtggctttgctcgcgtctgagccacccaggctccacagagggtgacggagtgaatcactcccgctgtccatcactaggaggtggtaagctttgtgaacttggattgcgttagatcaccacgtccacggtttcagttgctgtctcataatgttacacaggctgaagtgggtggttaccttttctagaggatgatcttatttttctccgttccgttttaatatgtctacagcagaaggccgtatttttggaaatgaaagtgtagtcttttattaataacaggcattagaggaattcactaatggaaatgttcaaagaatgtgtctacttccttttcttatttcttataccccaccaccaccaccaccatccatgaaatagaaatgtcagtcttagcacttgtgtgcatttggcattcttcctgttgctatagatgcgaaaaataatagcaggtaggtcctaaaagctttgccttcatagctggtgatctgtgccctcgcccttgccctcaccctctcctgtccaacctctgagtgaaagaccaatgagtgctttagtcctctgtacacaccctccacagtccacatacagactctcagggatagcagtacttgaagagagagccccaaacccaggactcatggactttcagatgccaacaatgtatatatgatcgaactatggggctcctggtcatactattgatggtattcgtacagtcctctgagcccttgaatgactgtcttcaacatcaagggccagtgttcttctcttacaaagctactatttgcagtagggattttcttgcctttcatttatttgctcagctagtatggattgagcaactgctgccggctcagctaactgtatgtcttaaaggaccctctgctcaggagactccagtttctaaaggagcattcagagaaccggcttccctacccctggctctttttcacaggtgaggaatcttaagctaattgccgatggcggagtgtcaggagggctccatcagcagcaaaggaagggtacttgcagccatgctcagggtacttgcagacctgaaaccaccagcataggaaacaagagaagagaggggcaggaggatgctgagggcaaaagcaggagtcaggggcaccctagttgtgtagcctggatgagctgtgcacccctcactcccctcctgatgcactcggggtaccctttatgtgtccccagtgtgtagcaagctctgtggccagagcttttggagcttcttgcctgctggcctcacttttctagaacaaaggcaggagctagggccatagatgctcagagtcagaacagaggcggtgagcctcttcctgaagcctgacactcctcgcctaatacatggttttaacaagcttagccatctggttcccaagtccataatagattagaagccacaacttaaaagaactgctacaagttagtatgtcaacagcagtgaaaattgagggccacttgtcctcattaggcaggaaagggacagaaaacaacacatctgactgctgctttcctatgtctcttaagaacttttacaagtctgcagaggtcatgaccctgaagaacagttggggcagtcccaggccctgctgctctcttgagaaatgtaaaggcccttgttcagggcaacaagggaaggacctaagcccagaggtggctgaaggccccgctctgaccttcccagacagctccgccgcggctgagtgctctccgtgctggtgaatttgctgttgtattttggaaagaatcatagcaaaatcagcatgcttgctttaaaatatgatttcatttatagtagtttgcagtttactcaaattttcatgagcgtgttaataactctgccagaacttagttacctcatttgaactacatggcgccccatgcagacaggtaaatatttcactagtgtggtttaaagaagcctgagccggggctgtctgactttgaagatcataaccaatttattgtgcttcccccggtgtttccttactatatattctcttatcaatattttaattgaaaactcgtctgtgtagccttcctcctgatcccagtgtttttaagattcttttgttgcatattaaatgaaaagacgtccagattctatgcagatgtgttcgtgcccggtgtgcagagtggagcatggggagtcacagggatggtttggggtgtatggagtccctccttagagaggaagctggattgcccacctccttggcctcagtgtccattcctgtcggtatgcaagggctgcatgcgagttttaaatctagcgaagcagctaagtatcagcatagttcacatcattgttttgatttgtttttgtttgtttgtttttggttgtttgtttttggttggttggttggtttttcgagacagggtttcccttgtagccctggctgtcctggaactcactctgtagaccaggctggcctcaaactcagaaatccgcctgcctctgcctcccgagtgctgggattaaaggcgtgcgccaccacacccggctacttgatttgttttaacaatctcccacctccagctgcctagataggccagggatggggaagaggaaaaaaaaatgttggatctgcgacagtttcaaagaagcagtattggatggtgtcctttctccagcctcagtcagtggtctaaagcaggtcacggaggactagggcctctgctccctttgttcttaaaggactggaggggcaactcgtagttaccagggcttgttgcccttgcagaggccctgggtcgggtcccagcaccatgctgtagctctcggccacctgtcgccctcttctggccgtcacgggcagtgcgcacatattcctctcgctagcagcattagcttgagtggtaagagaagacaagtgctcttgtcctcttcagttctcttaaatataggaaaatgagaattgactggcagcagtcacacaaatccggcagggaccagtgcaggccctgacacaggattcttcaccatgtgtagtgacacccatgctctactgaacttcattgtgtcagggacacaataacatttctcagcctaaagttctttccaaagctgcttacaaagaaccgagataacccctcattactaatggcctgctccttcttcttgcaccgagagctggccggccctgtgagctctgatgaccgatactgtgatgtatgtccattcattcagactctttctctggactactctgtctctgactggcagaatatcttcccaagtgaaagagcgcccagtgccctggcattgctcctcttgctccctctgggccttggagggactacactctggggtgtggtcctgggagctcaggattctagcaccacaagtatttctgaagctgcagctgcgctgtgtacgtgtctgtggtagtgttgaactgctagccggctctctgattatgttacacttcctccttagctgcaggctgttccttacctgcccgtttgagaatcagctctgcctctaaatggggctgagggctgttacaggccagcccaaagccgcaagctctttatccactgagccgacccaagcctctttacagagcactatacaaagcttgtgatttgtctgtgaatagttgaaatggttttttttttttcagttaacatcccaatttaacaataaactaactaaaagagtagtttctaagatatctgaaatagtccagtatttcagaattgagaatgtaagccagaaatggtacttaatgcttccaattccagcactccaaaggctgaggcaggaaaatcatgagtttgaggccagcctggactgtgtggagatagggactgatagagaaggaaagattagcgggtcacgtgaggggacacagcttgcttatgtcacacaactgagtaaaaagttgaagaaaataatttgtctagacagtgttctcactgcttaaggggcaatgtttaatgatgacgtgacgaggaattactattaactagttttgtaattctccgtagaggccctggactgcagagctgtgttggaaagtaagataagctgcagtcttggttgggcattggacctgttcagggtgcagatgcattcctgcatctgtaggtccctgtgccttgtgcctgcctatgcacatggcagattccagcctctcacactactgttgctctcgagttggtttaatcccagctgaaactcagtaaccctcagaaagctggtgctacattttctcccattggtctccttgagacaatggatgggtgctgtggaaaacctaaatagggtgcatgtttcagaatggcatgtccgccatagaggtctaagtgtttcacagagtgacaggaccgttcagggtaactgaggtctccgagggggtccgcttcttgtggatggcttcgtaaaacatccttctatccccatcccttttaatgttgggcattgaaccttgaacatgctaggcaaacagctgcaccctggcgacactctgctctgaaatcagaaatgcatgtttccaatctggaatctttctaatagacctcttttataggtatggccgttgttctgattaaattttatataatttatgtaagagtctatataggcttttaaattaatttgattcttaagaaataaaataattaaaaacctggtctgtggccacttagtgtctcacttttaaaaggtagcttgtttctggatgtgattttacaggcctttaatcccaggattcaggatgcggaagcaggtggatcgctgcaggtttgaggccagcctggtctacataacaagttccaagatagccagagctacataatagaaagattctttcttggggggggtaggaggggaacagaacagcttactagcctttaatcccaggattcaggatgcggaagcaggtggatcgctgcaggtttgaggccagcctggtctacataacaagttccaagatagccagagctacataatagaaagattctttcttgggggggtaggaggggaacagaacagcttactagcctagttttatagcaattgagaatcttctagatgaaaataagaagtgtcctggcctgccacttcacagcctgtgtctggtgtgggcaattggtcagaatgtagagccgggcgtggtggcgcacgcctttaatcccagcacttgggaggcagaggcaggcgaatttctgagtttgaggccagcctggtctatagagtgagttccaggacagccagagctatacagagaaaccctgtctcgaaaaaccaaaaagaaaaagaaaagaaaaaaaagaatgtagggtacttcactatgacagtaagggagtagggtggggaggtaccaatagggaatatgagtgggagggtgtgtgggtgggtatgagtaggtgggtgggtgagtgttggggtgaatggttgtgtgtgaggggatgtaggtaggtggtgtgaatgaatgtggggtgtgagtgggtaggtataagtgtaggtgtgagtgggggtgagtgtgtgtatgtgtgtgtgcagtgtgctgcatacctgcctgttctcttctgtcacctctgtcctaacaatgggtacttgggggcaagtctccttattaggcttccacttgttctagccatgtatgctgtagaggaggatgagagccaagctcatggcagtggccaggcagggtccacacaggaagccctgagcaggattctgttgccttctttctcagatgaagcactttgtctaaatggctttcctggctcatcataaagccccactatcacttcaccctacctctaaaagtggagtcatgttttctaagctgtagcccttcatccctctgtgccacaggactcctgttttctcccacacactcgttggagcagctagggaacaggctaaaacgaagcccactagttctggtgtactatgcctcttgtccccaacatctcgaggcctctccattatctgtgaggtctgtgagtgtgctggcttcccctgggacaggagggaacgggcgccagagctccaggacaaggcatggggactaacaaggatgtcagtcagtgggtcctgaatgagaatgtcatctcggttgcagggagtctgtctgttcctaagccattgtccctattgttactgatgctaatgtttacagagctaatgaactaagattaaagtgcagaactaagaactgtattagaagaatagaggagacttcccctcagactctcttctggtgcttaaaaatggtcagaattacatttgatgagccttcagacagctttctcagtctggctccgaagccaaagccgtggtcccctggcacctcatcaggccatgaagtcagctgtacaggaccctctcccagaggtgtcttcagaaaccacatctgagagctaaggcacattattaggaccagtcccacggtggaaatgtaattctgtttatctttgctcctagtgagaaacaaagttacaaagatggacccctgaggtctgcagaggtttgcatctgcagcatccctgcctcttctcctgctctttaccttctctgttccctctgctgttcccagtcctggcccttctcctccgtggtctgcacgctcatccctcattgctcttccactagggactgttcacctccaaaccctgtggaccattttctccctcacgccttccagtcacagtccagctcacttggtgacgctgagtgtagtccaggcttggctctcttcatgctgccatccatactccacacaacaggagcccctggctgtcagtccccgtggggtctgtgtctgtgtctgttagtcctgtctgccttgtccgtccttcccctctacatatccaggccttatttacataccacccttttctgccaccttctcctcgatgcttgtttaatttctcccttcacgggcttccatgaggcctcatctccacaaccatatcctttgttgttgtgtaattgttcatttgtgtatttgttacagggcctcgtagagcctagactagcctcaaacttgctctgtaatctgagaccagccttggctcctgaacctcctgcctacctctatctcccaagtgttcccaagttacaggcacttactaccacctcatcttgcctcatcttgtaaaggttgtggctgtctcctgaccacacctgggttatccgtaccttcatggagacggagactctctcagtcctgtcacagttgtctgtcaagggctcctacattaccattgcatttcattttgagcctctttgctcacagaaccttcctaatgccctcttcctcagaactgccccacagtcactataaatacatggaggcagacatgagtgtgaaggacacaggacctggggacttcctctgtgaagaggccggtggttgccgtgaggagagaaagcgattaactctgaaaggtcacatgtagccgacctgtggagaccctcaagtacctaagaggtcacgtgtcagattaggtcacgttggagaatgctctagccatttctcctgtttgcatgtatcttagctctccaagtaaatactgtgtctttaatctgatttgcgttttggggtttttgttggtgttggtgggttttgtttgtttggtggtttgtttgattttggtttttggttttttggtgtttgagacagggtttctctgtgtagccctggctatactggaacctactctgtagaccaggctagccttgaactcagaaatctgcccgcctctgcctcccgagtgctgggattaaaggtgtgcgatgccaccagactccgccttgtctcacagctttaacgaatgattttatggtacaaagggtcaccctgggatttaattaacctcacctgtttgataatattcagatttatgtcgagaattggcactagagcaattcaaaaggaagacgttggggtagatggaaaaagagtggcaggaacaggcactggctgggctctcctctccgtactgtcatttggagggtggggcctatggtcattctgtatgtccatatgtcccctcccccacagagcagcaaagggcagtgtatctgcgtcttcacctctcactgcccctgagctctgaccagagcacagccagcaagacagccaaggactggccatttgatgataaagacccatcagccagatatatagatacagatagatattataattaataaaaagaagaaaagatcaatgggtcagcttttgtcttgctcaggctactaagcaaaatactagaaactgaatgattgcttataaacaacaaaaccttaagtccaagacaaaggcactgcggggtccggttctctccctccggggtgtggaaggagagagctagctctgtagggtctccttcactaggtcactaatcccactctagatccctcgacctcatcccctgcagagaccgcactctgaaatgccatcaccccgcgattcactgtgcaaacgggttggacacagactctcagaccctggccctgcaggggaaatctcctgactttatcttacagcagctttctttaacagagaggactttccatgctcgggagactcagaggacttgtagatgtatccacagggtaaactgctcccagataagcccagggccctcttctttcatctgactctctggaaaatcgaggcctcagctcacgctagtgcacctcactgctgggcagatgctggctctcagggcacttgacagcttgcaccttggttttcagtttttgttgagggcagggtgtttggttgggttgagtggttctttgtttctttctttctttaaatttaaacaacagaatcttgattttttttttaagtaatgtgtattctgcatttcttactctaaataaattcaaataaaagaatcttttatagtttgcttcctagatcccgtttctaaaatatagtaagttaatggtttaaattcagaatttcctttttgaaaggacctttaagatgttttgtgataactttcaaggtaaattccaattttgtttaatttccatgctcgcagtgtagaagcaattgaattacccacggttgttccctgagcatagaggaggagataagcactccgtccgtctgtattgacagatgtgaacgtcgagcaactgaagccttgctgtaaaccgtgacttgcttgggcttcagccaccgccgagctctggaaatgagtgctggccctcgcgtgcacgctcgctgtctgcaggtgctccgcttgccttctgggatgttggtttaaaataaataatggtagagcccaaaacaggagagcgctctctgctttccagttgtccatcctcgaaggcagagcatggctccttggcaccttctgcagcattgtgtcgcgaggcagggcaaggtctgagtctagccagcacagcctgcctgcaggaaccactccagtgtcctggccagtctccagcctcattctctccactgcttagagcaggccccagcaactataatcatttgcagatgaggtaactctgtcaaggaggtgatactgtgtgtctgactgttactgtccgcctgctagaaaactctcacggcatgatttctccaccgtccacagcctcgatagcagaggtgctgtgatctctctgtcgtccacagcctccatggcagaggtgctggtcatgataaaagattgtgcttccccatagtgcatttacttctattccaaataactgccaggcgtggtggcgcacacctttagtcccagcacttgggaggcagaggcaggcggatttctgagtttgaggccagcctggtctacagagtgagttccaggacagccagggctacacagagaaaccctgtctcaaacaaacaaacaaacaactggcaaacatgacagctgacacgagagccctcagtgccagcgacctgactttcgctgctcccagtctatctcagctgggaatgtgaaacagagaagacgtttgttctgcctggcacaacttcagctttcccgtgctggatggcacatcgcagtgtcatgcaagcccctcaaacctcacctccatgatgtcctcatgctgcagagccaccacgtaggatggtaaaaaccctggggtctgtggctccttgcctggttcctcctggctcccatcctgcagctctgcccacagactgtgaccctatggtgacctatgcgacccgtcggccagtatctgagcagtcagtggaaggaaggctggacccagaaaccagccttcctcacagcatgcagctgcctctcctctgcatcgtgtgccagctgagtgccaccaaaaacatgttcttctatgaaactgccttccctcttgttctcattcataaaaccataagatgtgaaagtaccttaatccctttgttaacgattagaggttgtgtggatctgcacccgcacagttaagtctctgactcgctcagaccccagtctgaacccctggttttagctccgatggcagtctttacgctgttagtccacagagggatggtacctaatgcccaggaaagccaagagtgcaggccgacacagaattgtctacacttgagcattgtccgctttttctaaaatttgatttgtagttctccagcttgacagcgtcgtgtcacagtatcaaaaaggttggacacacctggctctgcccttggcccaggaaaggataaagcgggaattgtgaatgggaagcagcaggctttatagatggagagtcaggctttggttccccttaggggcactgctacttctgctgctgctgggcttctgcaaggacagtctttgacggcatccgtctgatgtctgggtcatatttgatctgcgatggcatctcctgcctgtgtttatgatcctgtctctaaatttgttttgaaagcacagtcaacaatattaacaatgtgacgatgctaacggtctcttccgctgttccgtggggatgctggggtaaagaagtctaaagtgcctctgctgctccctgggtccttgtgtgactgctttgtttcagggagataggaacagaggtgacagctaaagagatggatgtgactcgtcagcatgcttagggaaaccccggagagaatgttaaatggatcccccagccttgctgtctgccttgcccaatctgtggttcacaacaccaacttctgagatttactggtcctcatggctttgaaaatgtaagaaagtcacatgatgtgctttgaatttagagatgatttgtgttagatgatcatgtgtcacaggcagggacaccacgtggacctcactctggtcgctgggaaatatgtttaggggaagcacagaggtgagggtcctccctcctttgagccatgaaatgtcagaactatgcatggtggctcatccatctaattctagttctaaggaggctaagacaggaggattgccacaagttcaaggctaccctgagctacaacacactgagtttcagaccagtctaggctacagagtgagacctatctcagaagcctaaccatctatctccccacctccaaaattgtgggttagtgacagagcttggctggcagtcacacacacatccaaaagtggggtttcagtgtgatcttcgtcctgtgtattgaagaaggcgtcaccggcttagcatccggaagctttccgcatactgtgagcagaggagagtcccctgctgggatgggcactgaggtacgctgggtgcttcttgctaaagaacaaccaagatcagattgctaacagcgaggaggctccttcgggcactcagagactgtcagatttgcttaggacttaaacccaagaatgttcagagaagctagctcctaagagagagcagacagcgtcttatctgaccgtcttagctggaattccctttccaagtacctcttcaatgcacgtggcaaaggctgccttcccacctgataacagccccctgcctctgcacagcccttaacacatctcaaatgtgacaaagttccttatttttcatgagtttatctaaatatgaatcagaacccgcttctaattcttcattccacaatttagtctagaaaaattagcataaagacatgattgcagctaagcagttcgagcttacatttgaggccctgtgtcaccttcttttacccacactgcaacctgaacacgaatccaagaactactgagaatgggattcctcattctacacgcgtgcttcacccgttcttccccccgagcttcataaccggtgcagttgtaaaacatttggtgtggttttccatagtgagacccatgtgaagtacagcattgcacgtccatactgtggcctattgtctgaggggagggtcttctccttagtgccccgggcttcataggctcatttggtcccagatgactctgggccactgccccacaattcacccagtattcaggagcctttccaaactttcttctttaatcttagtaagttactgtatttcgtgggtctgagtattttgcccacgtgtgtgtctgagcgctgcttgtgcccatggaggctggaagaagatatcagatcccttggaactggagttacagatgattgtgagcagccacagggatggtggaaccgaacctgggtcctctgcaagagcattccgtgctcttaaccgccgagccatctccagcctttctgtgtgactctctgacttgttcactagtaagttagtcgtttgctcactaagcctctggccgtgctcttaggtacttgcatctgttgggtgtgtggacgcctggcgttctttctagtcagaccacgctcacttcctgcacgtctcccatcccttccatccaagcgtctggctccttcctgtgataagcacccctcagaaggcaaggtacaccatggttgttcctgggctgcctctgggccagcttggagcacatgtgttgcagaaaattctgtgctgtgtccctcctctaaagtgttctccctgcaggctccggaactggaataccatggacatacctcgctcctgggagccattgtgagcctgtggtagcgagctgtccccgacctgctccacaccaggctctcggggccgcccgtgcagctgctttgctgcctcatctctagctgctggccactcagtgccaggcagtcccactctctgccctgcagtcacggggcccacccttcttcctgttccaggcacccatagcacccagaaatgaggcattcaaactgaggacaaaggaaagcctctctccttcccttgcgcctctgttttagagaaggtcccagcggggacactttctcagccttcaaccattgagcctcaagttctggctgaaggaggtaaaaacagtacgccgtgtacatgtctgaaaatgtcataagccattactcaatggaatattaaaaaccagtataataaatgcatttctaaaaatgacagtaatatcaacaaataataacaataacagtgattttccggccagtgtgggagtgccagcgatagatgcttcactcttcctgagagccagagaccctttgaggaaagctgagaagctcactgtagacactcatgtggtagaaccattcctgagctgcacgtgatctgagctccgagggctgtgcctgctagcttgcccccagggagctccagttggtccctgcacagccagcaactgtatcccttcatgggcatgcggtatagtgtggccttcagagccatccaattatgggtatcatagttttagctctgcgtacttttttttttttacttaggtatgctgtggaagtttggatgggaatgggtcccgtaggcttgtgtgtttgaatatttggtccccacctggtagagttgtttgggaagatttaggatgtctgggcttgctagaggaggtgtgacactggggtgggctctgaagtgtcaagactcctgtccatcccagcatgctcactgccttctgctttctgggggagatgtgagcgctccactgttcctactgccatgtctttgctctgccatcacagaccctaaccttttggaaccccagtccctagtaaatgcctcctttaatgagctgccttgctgcagtcacagggttttatcacagcaacagaaaagtaacaaaggcagtgtctctctgtatagcccaggatatcctagaactcactcaaacacgtgacccttgtgcctcacttatccaagagctaaaacgacaagtatttgaggctagcctgaaaaacatagtgagatcccattgctattccaaaaataaaagtagaggcaggagagatggctcagtggttaagagcactggctactcttacagaggacccaagtgtgattccccactcacatggcagctcatcaccatttttacctacattccaggggactcgacaccctcttctggtctctaaaagcatcaggcacgctcatggtgcacatgcgtgcatgagtgcatgcaaaacaccattatacacaagatgaataagtactttaagtaaacaggaattcatgagaaatggaagcttttccctcctcgcccaccgctgctcagtggctctgtgtctgtccccttcctgctggtggctgcatctttacacatctgcagttcctttggtctttcatctgcccagcaaagagtcagacggactgatggcatcggggcctccacttgcattggttcactgttctcccatctgcccggcctaactcctctgctccctggcacccgtgactcctgctgaagtccacgcaggtctgcacggaacagcaggtcctctttccactgcagccctagatgcaggacccaggtgtccgttttttagtgacagtcaggtagagaagggggaaaggtacgaccagatggcctcacgtaggggggtgacaggaggctatagagctcccgcatcctgtaatgcaaccatggacttcacaaggaacacttttctttgctgtcctgtaacaggctcatgaggccactttcgactgcctgaccaggctgccccccataaacgagccctgtgaacgagcttgctactcagtccaaggctccacagctgccagcctgttttggctgccttgggcccagtggccaccgtctacttgtctaccccacttaccatgtgcaggaaactcttttccgtgggccgcatagccgtttgattgtaaattgcattaacttcctggagccttgccagccgcttgctgggtgtctgatgctatctgtatagactttaggtggaaactggaaatctcactgaacttctgtggtaataaaattattacagttgtaccctacatctgttcactgacttcctgtgggttttcaccggatcacatgactgacaacagagacaggctgtatgtagtaggccctgggtgtgccagctctatccaagtctcaacgccacctcagacttatgctgtgtcgctgagtcgagcgtccgggtgtcccactgtggtaggttgatttcactggagctgataaaaaaaaaaagttccggcccactcgagagtctaacgtttcctctggctccaaaatttaaaacaacgggattgttgtaagtggttttggacaaagaccaagctccaagcttcggagatgggttttctccagtttcaaaaccaagccacgggccaaggatcttgaagagaggtgtgaaagccagggctcctacctggcagtccccttatgcctctccagcacccctcaggccacagtaacccaaaagtccctggtaggagccacagcagaggcctgagaagggctagagaagcaaagtacgggggcagaaagtgaagcactgggctgacatcagcgctgggactcgcccacagctggcccgcagctgcctcgtagcctggcgtgtcagggatggggacgccccccgctgaggaagctggatgtcctcagccacacaggatgacattagtgttcttcatgggcttgcacagggaagggtgactctttctggtttgttaatgttaccttcagacatgacattttgtggactgcatcccgacaaaatatgtccccggtgtctttagctctaaacaaaaccttttgtcttccctttccttggctcttgagcattctaagatgtctcggagaagcacatggtcttaaggatatctgttcaaggctctatagctaaccagacagacaggttgtggtgatggggaagcagggcatggaaagtgtggtgcaggcccagctcaggtagctgctacaggcgcatccggctgctggatagcctgtttatgcctgttacctgctgtacaggagtcctcagtcagccaggcttgcaaatagctcgtcccaggagaaggggcgtcacctgggctttcaattgtctgcctcatgccaccagtctggaaaataggtctatgtttaccttgctatttgtgccaccgtcctttatgaaccatgaagtgacctgctgctggtaaagattccagaaagaacccagaaaataatagctcacagttcagttattcacccaaggagaaagatgacagacagacagtgggcaggtgctatgatgtggtctcagagccatgtgtgctgtgtctagcagacttttctccagcagtgacaatgtttacgttgctgtgttattgtctctgccttctacttccctgtgactcatggtgcacacccaatagactacaacttgcaaacactgtctgtagaatgatcaaatcttcaccagacagcaggcaggacctaaaccctgtaggccacttagccataagttcccagcccacagagctacttaacaacagcttgcttggtcttggacagttagaattgccttgaagagcatcagttgaatcccaggatagtgagtgacacaaggaacataggtatctgccatgaaggctaactgcatgaagcctgtgcctgcttgactttaaagttacagtggggtcagccagcaaggcagggaatggaagggtttagatcccccactcgagtcatctgacagatgtcagaactgagaggagtacataagtcctgcattgtacacaagctgagaaaccaaagtcccaggaaaataccctaaagtgcccagcttgctttcctggccccaacctgggctggcagagggcagcccgtgcatgtcacagtgagacacccaggcaccacagttgaatgagaccattgaagagcatctctttaaaggcctgggaacctcatacccacctagctgtggatgtttggaggacggactccccaatccttggtttgagaggctgcagtggaagagtcctatcttctgctggcccgtggcctctgtagcaggttactcaacttctccactctctttctgtacagtactttgtttaaggcctgacacaagattattgtgtgatatgaagtcctttgttcattccattcagcaaataagtgtccataccatgccagatgctcaaaaactaaggtttctggtttccgaaagcccgtgatatgtttacgtgtgaaataattcaaaaacaggatccgccccaacgtaccagtgagagctgagaagacagtaaacctgcgggctagggcagccacgttagtcttcagtaaggtgctcataggacaggtgcatgggagtgggtgtgtggttgtgggtgtgtctgtgcatctgtatttgtgtgcctctgtgggtctgtgtgtgcatgtgtgcacacatgcctgtgtaagtgactttggtcaatgtcacatcccctctcttgggctgttcctgcggctccccccttggtccagccccatctgtccagttccatgcagctcagagatcgtgttgtttcccatcccagctccttcttggatgtcactggaggtgtcataatcttgtgaatacctgtgctgtggtcctaatttcacatacatggtagggatggcccctgtcgaattactgtaactgtaaacctgcctcagggttactctcccttcccactagccagcttctgatgaaaggccaaggccgttctccagacccatctcctcccagtgaccaggctttgttccttagagatgtccgtggcctgagcctggtgtagagagccgttgctcagtacctcttcctagcttccatgcagagaggccaggtccccacctcggcgaggagcataggagaaacagactcgcatccatcccagtaccccggtctcttctttggtcgttgtactaccagtaacagccagcatttgctggctgcctgctctgtgttagacattctgcaaggcctttctgtcatcatatggcttcactcatttgagcgctcagctgcgacagtcagacagttaaatgcaaaacctcagaggatagtgccaaactgtgttccgagagcctgaggctgagcaggaacgggacttaaagagtcacaaccaatgaaggcggacttctgctccgaaactgtgggtctgggcactcctcagccacagccatattacacactgggaaatatctgtaaagggagggaggagggaagaagaaaggagaggcgaggagaggaggggagggcttaaatgatgccttctgaatagtttttcttgttgcttcagagattaaatgattgtctcaaaacactttaatatgcctgttaatgtaatcaattatgttagctagaaactggcttgccgtagtctcagaattgctaaagtgtgttgagtggcctttaacttggtagccctagccagcctggggctcactatatagaccaggatggtctggaacacacagagatcctcctgcctctgcctctgcctctgcctctgcctctgcctctgcctctgcctctgcctctgcctctgcctctgcctctgcctctgcctctgcctctgcctctgcctctgcctctgcctctgcctctgcctctgcctctgcctctgcctctgcctctgcctctgcctctgcctctgcctctgcctctgcctctgcctctgcctctgcctctgcctctgcctctgcctctgcctctgcctctgcctctgcctctgcctctgcctctgcctctgcctctgcctctgcctctgcctctgcctctgcctctgcctctgcctctgcctctgcctctgcctctgcctctgcctctgcctctgcctctgcctctgcctctgcctctgcctctgcctctgcctctgcctctgcctctgcctctgcctnnnnnnnnnnnnnnnnnnnnctgcaataacaattgtccacttgaatagtaacttcattataaaatctgcccatgtccgccattgacagcttgtccacatgagcaccgtagtgttttatgcactggccattaagggacgcccctggcggtgagacggtacacaatacgtgggagctttgtctgtttattgctgaatagtttacttcggatgagacggacagtccccaccttgtacctttgtacagggtgagatgggttccggtttataacttttggtgtgacagtccacccagggaagctggctgcttttcccacttccacagcctccagacttcaggactctctacctcgagcccttccatcagaacagtcacaggaatgtcccttcccttccctgtgagcactgtgagggtgggtgacagccaatagcttagcttcctctggacagcttagctgtgtgagcagtcccaacctcctcagacacagacagtgggctcacagaggtcctctcatgtcccttcaagaccctgtcaggaaacctttcccccacgtgtcactgtatggagaagaggccccacccccttgagtcacttggtttgtttgttttgtttttagacaaggtctctccctctctctctgtagccctggttgaccttagaacccacagagatctgcctgcctctacctcctaagtgctagaattataggtgtgtgccaccatgtggtttttaattctaacaacaaaggcccgtgctgcctaatggtttcattgccacagggaagtgcagggcactgtaaggagaactgatcctcggtggtacctcagagaactgcagctgactgaccactgtagcagaatgcctaaaacccgggcgctcccttcaaacccacctcgcccagtcagtcaggtggggacgttcagcctcactctatccaacaggctctgtgtccttgaggcgtgcacagagcctgctgaccctgggtgacccttccgttaggagggtgactcggtctcagcaggcagttgtgctgagttgccctgtcctaaggctgtgccaggagcagtggttggatggtgtgtgaggacggctgctcagtgaggaccactgctcggtggtggctcctggcagtgccctgttgctatagatctcattttccagatggccaccacaatagttggttcttgtccacactcacatgacactcggtgccaaacagtgaggagccactttcacttcagcacagcctgtagaacccactgcctggggtgtgtgccattgtcctctaagaacgttctgaattttcacaatgtaactcagagctccccaagccacaaaataatctaatgctgcttaactctgtccctcttcagtcattcagaaacctgggggtctggggcatgggtgttttcagtctgcattgttcgttctgtctcatacacacacattgtaggggtgtgtgtgtgtgtgtgtgtgtgtgtgtgtgtgtgtgtnnnnnnnnnnnnnnnnnnnnnnnnnnnnnnnnnnnnnnnnnnnnnnnnnnnnnnnnnnnnnnnnnnnnnnnnnnnnnnnnnnnnnnnnnnnnnnnnnnnnnnnnnnnnnnnnnnnnnnnnnnnnnnnnnnnnnnnnnnnnnnnnnnnnnnnnnnnnnnnnnnnnnnnnnnnnnnnnnnnnnnnnnnnnnnnnnnnnnnnnnnnnnnnnnnnnnnnnnnnnnnnnnnnnnnnnnnnnnnnnnnnnnnnnnnnnnnnnnnnnnnnnnnnnnnnnnnnnnnnnnnnnnnnnnnnnnnnnnnnnnnnnnnnnnnnnnnnnnnnnnnnnnnnnnnnnnnnnnnnnnnnnnnnnnnnnnnnnnnnnnnnnnnnnnnnnnnnnnnnnnnnnnnnnnnnnnnnnnnnnnnnnnnnnnnnnnnnnnnnnnnnnnnnnnnnnnnnnnnnnnnnnnnnnnnnnnnnnnnnnnnnnnnnnnnnnnnnnnnnnnnnnnnnnnnnnnnnnnnnnnnnnnnnnnnnnnnnnnnnnnnnnnnnnnnnnnnnnnnnnnnnnnnnnnnnnnnnnnnnnnnnnnnnnnnnnnnnnnnnnnnnnnnnnnnnnnnnnnnnnnnnnnnnnnnnnnnnnnnnnnnnnnnnnnnnnnnnnnnnnnnnnnnnnnnnnnnnnnnnnnnnnnnnnnnnnnnnnnnnnnnnnnnnnnnnnnnnnnnnnnnnnnnnnnnnnnnnnnnnnnnnnnnnnnnnnnnnnnnnnnnnnnnnnnnnnnnnnnnnnnnnnnnnnnnnnnnnnnnnnnnnnnnnnnnnnnnnnnnnnnnnnnnnnnnnnnnnnnnnnnnnnnnnnnnnnnnnnnnnnnnnnnnnnnnnnnnnnnnnnnnnnnnnnnnnnnnnnnnnnnnnnnnnnnnnnnnnnnnnnnnnnnnnnnnnnnnnnnnnnnnnnnnnnnnnnnnnnnnnnnnnnnnnnnnnnnnnnnnnnnnnnnnnnnnnnnnnnnnnnnnnnnnnnnnnnnnnnnnnnnnnnnnnnnnnnnnnnnnnnnnnnnnnnnnnnnnnnnnnnnnnnnnnnnnnnnnnnnnnnnnnnnnnnnnnnnnnnnnnnnnnnnnnnnnnnnnnnnnnnnnnnnnnnnnnnnnnnnnnnnnnnnnnnnnnnnnnnnnnnnnnnnnnnnnnnnnnnnnnnnnnnnnnnnnnnnnnnnnnnnnnnnnnnnnnnnnnnnnnnnnnnnnnnnnnnnnnnnnnnnnnnnnnnnnnnnnnnnnnnnnnnnnnnnnnnnnnnnnnnnnnnnnnnnnnnnnnnnnnnnnnnnnnnnnnnnnnnnnnnnnnnnnnnnnnnnnnnnnnnnnnnnnnnnnnnnnnnnnnnnnnnnnnnnnnnnnnnnnnnnnnnnnnnnnnnnnnnnnnnnnnnnnnnnnnnnnnnnnnnnnnnnnnnnnnnnnnnnnnnnnnnnnnnnnnnnnnnnnnnnnnnnnnnnnnnnnnnnnnnnnnnnnnnnnnnnnnnnnnnnnnnnnnnnnnnnnnnnnnnnnnnnnnnnnnnnnnnnnnnnnnnnnnnnnnnnnnnnnnnnnnnnnnnnnnnnnnnnnnnnnnnnnnnnnnnnnnnnnnnnnnnnnnnnnnnnnnnnnnnnnnnnnnnnnnnnnnnnnnnnnnnnnnnnnnnnnnnnnnnnnnnnnnnnnnnnnnnnnnnnnnnnnnnnnnnnnnnnnnnnnnnnnnnnnnnnnnnnnnnnnnnnnnnnnnnnnnnnnnnnnnnnnnnnnnnnnnnnnnnnnnnnnnnnnnnnnnnnnnnnnnnnnnnnnnnnnnnnnnnnnnnnnnnnnnnnnnnnnnnnnnnnnnnnnnnnnnnnnnnnnnnnnnnnnnnnnnnnnnnnnnnnnnnnnnnnnnnnnnnnnnnnnnnnnnnnnnnnnnnnnnnnnnnnnnnnnnnnnnnnnnnnnnnnnnnnnnnnnnnnnnnnnnnnnnnnnnnnnnnnnnnnnnnnnnnnnnnnnnnnnnnnnnnnnncttgtctacccagatctccctttcctacactgaggaatctcccagctcgtgatattttatttcagcccgaagtttccacctcactaggaaaccatggagctcagtcccccacaccgagatggagaactgaacttcttgttgacccctcttcagacccttccaagactccaagaccttactgcagagtgcagggacctttggtgtcccaggcccagacactgcttactggtgtggacactccctgctgccttgtgacccatcagcacagcatccgtgggactcttgtctaggacgcgcttcctactccgtctggccacgccacctcggcaggccctgcgtgtctccccctccccagcccttgggtggagagttcattgttgtccccactgccacttgtctctccttccaagaacttggacttcccgtgccaacaggaactgctacacccctaggccccagcccacacaggcctcctggcaccaagcagccaacactggagtaaacaaatgtgctctgtgataagcttgagggagaaggggagctctcctgtctgtctgtgagtctagggcatgctcagtgctcagtgcgtggagattaactcactgacacagtgagctttgaacacctcctggtactctgggatgtggctacagcaagcactggtctctgagcctgagcaccggggatgctatgggtgggtgtggcccgggtgcgagtggataccttgttacctcctctttctggcctcgcttcagccttccacctacatcctaggaccctggcttgttctcccaatgctgcctgcaacagagattagcacatggaacctccctggggggaaaaagcaaaaggctttcagtagaccccagctgttcctcaggctgcaggggaagttgcctctgtcccaggtagattagaaggtcaggaataacattagagctagaagctaaatcctggtgctgtggtacaatggcaagtgctccctccggccactgcctgcctgctcagaagcaatggagaatgctccagggccccaggggatgtacagaaccagccctgagcttcccacagccctaagaggaagaactcagccgcgtagtccccagtaggatgaggacaaggccagccagagccagctgcttcctagccatgagtgcgtgcctccctcttcagttcatggctcaggactttctataagtaaataaatatcccttcattgttgacagtttatcacacagctggattgacagagccactcaaacaagcacttgcccacgcccagagtctacacgtctcagagaactttatacagtctgaagaaggttaagagtgtttgagggaagattctcacctctaagataacccacttctcaagacagaatctcccaagaagagccaggccttgaccctgaacaggaaagagggtgtttaccttgtctgccacccagcagagacccacctccttttaccaaccctcctttaggaccctcctccgcaaaccagccaaggtcacatcatcttagttactattgctgcgatgaaacaccatggcccaagcaacttggtgaggacagggtttgtttcactcacagttccatacaacagttgaggacaggaactcaaaagacagagcaggaacctggcggcaggagctgatgctgaagccgtggaggaggatgctgactgacttgctccccatggctcgctcagcctgctttcttacagaacccaggaccaccagcccagggatggcaccacccataatggactgggccctcctccatcagtcactaattaagaacatcctaaaccgggcgtggtggcgcacgcctttgatcccagcacttgggaggcagaggcaggcggatttctgagttggaggccagcctggtctacaaagtgagttccaggacagccagggctacagagaaaccctgtctcaaaacaaacaaacaacaacaacaacaaaaaaaacaaaaaaacaaaaaaaaactaagaaaattctctacaggcttgcctacagcctggtcttagggagacattttcttagttgcgatttcctctcagatgactttagcttatgtcaagttgacataaaaccagccagcacagcaggtaagttatattttcccagcccagaagccatttgactggcagaatctgtgaaaggcctgtattcccagcctgcaagcacttaggggagggccttgctgtacaccccccactgcttgtgcttgtacatgaaagtcatcttgttctcattgcagaagtttccagaactgaagttcaaatacgtggaggaagagcagcctgaggagttcttcatcccgtacgtctggtccctggtctacaactcagcggtcggcttgtactggaacccgcaggacatccagctgtttgccatggactcggactgaagcaggacacagccacgcccaccccagccacgcccaggagcagaggcagacagactgcggcaccacagagggtcaaacaagcgtgcttccctcacacactgtgactattgggagactgcgccagttagcagtagttcactcagccttgattgtactgcaagggcgagacaaaaataaacgggaaacgtgctgttcaacatgtgacttatttttaaacttctaaaccccaaacctagagctgtcccaaaacactggggccttaggcacataacaaacgtatcaacagctcacaccatttccccttttataaaatttgttattgtttttagatttatttttattctatgtgtatgaggttttgcctatatttatatatgtgcaccatgtacaggcctggtgcccacagaagtcagagagggtgtcagacaggaactggagtgacagttataagctgccctgtggggtctgggaacagaacctagttcctctgagaacaacaggtgctcataacatgcccgctgagccggctccacagcactgcttctcttcttgagacatgttctcccactgtagcccttgccgaactgaaattcactaaggagcctaggctggcctagaacccacagcaatccttctgtctcagcctcctctgagtgcagggatcacaggtttgagccaccacacccagcctacacatcttttttttttagttctctaatattgaaaatgtttgtttcagcttgtacaacttctctcatgtgtctgtgtgcatgaacgcatgtatgtgcatgtatatgtgtatgcatgtgtgcacgtacatgcatgtgtgtatatgtgcatgtatgtgtttccatgcctctctgcagcacaagatttcataagcactgtacctgccatgattcggaccttccccagagaggttaaatagttcttttcttggaggattcacctctgagctgtaacaggaattctgtcagagtcaagcaaaattaagtttatctagttggtatcactcattggggaaagcttaatttggaaggcaacctttttccttcaaccaagccaatcggatgaacaataggagagccacttactgagacagtattccatgtgagatgaaaaatacttgtttctccttgtttctgactttgaaaaatgtttgggaccacgaatttggtcccacacacccaaggctgtgtagagtggaccatgtgtctgtactccaagcgccaaggttccgtggctgtgtgtgccaggttgcagtgtgtcagtctctgctcactccgttggtctcttaggagcagcctttccatctgtccccacccccctggctgagggcagagccctcatggtctgtaactcatgcacaccccatggctggtttcccctcagtgagctgggctgagccttccttccccggttttcagtcccttatccttttctggagaagatgaaattggagccttctctggtgtggtggtgcaggggccagggcagccatccccctgctgcctccgaatactagttcccaggaatggctgggatgctcacgctacaactcacttgtgatcacaaggacagggcttctcccctacctccggcactgacttcccagtccagctttgagaggaaggcatctggaggtggaatggcctagtccgcctttgaggcagtgacgatgtgtgtttcctacctagagaaatgattgactgctttcgtttgttttcagtgcgttctaatttgcttctttttcctgtaggcaaaacaaaacaaagcaaaaaaaaaaaaaaaaaaaaaaacctgtctcatgtgaaataactaagtacttctttggtaggctagggactaagcaggagcatgagacagcaggtttttttttggtttttttgttttgttttgttttgttttgaaaactcttgtttatttacaaaaatagataatgcatatgtaagggacccacagtccccttcacttgtacccatccaccccctttatacacaaaggctccttggtccaaaggcagagttctgattgactgggcaggagcagcaccaatagcctacatttcgtaggctgaggaaaggcccagggagttgactgtagctctgtccttgctaatggaggcaggcagagggctggagcatcttttcagtggatgctcagtccttaaaaccttgaatactgcagagaattcgtttctggtgccctggcaacgttattcccatctgcgtcaggtcctcagccgtcatctccagcacacactccatggtgtccggtccagcccagccgaagggaagtgcaggatgtagcgcttcatgcgtatggattcaagccactcagagacacttcgataagggatccatcccatcagagccgctcagactgggcaggcgtaaggtcaccctagggtcaaagtttctttaacatgaattacagtccctgcagcccatcgctatgatggaacacggtgcctacaaagactctgccccagcttcctggctccacgtgccctgtgcccccgccccggtgcttgcctgctactgacactctctgctagctcatgggctcggtggcctaagagttccacccgggcgccactagacagaggttcccagttgtgctatggcctgcctcagctctgcagtcactgggtctctttctatcccttagcgaaggacaggtccatcacatggcaagagacttaaatgataaggtgggttgagcttgaattcaaatatcagtttgtttagaactgtcaagatttaagaaggcgtctggctgaagaaatggctcagctgttaaaagtacttactcctgcagtggaccagggttcagttcctggcacctacaatcgtctgctacccagttgcaggatctaagatcctcttctgacttctgtgggtaccaggcatgcttgtggtgcacatatacacacagaagacacgtgtgtgtgtgtgtgtgtgtgtgtgtgtgtaatcatgcaaggttagcctgtgttcgtgaaaaggtaaaaattgacctgattttacttatgatcttttcctgagataaacaatgattgcagccagcatggttgtgcatatccttaatcccaggacccaggagacaaaggcaaatggatctctgttagttcaagactggactgggctacgtggcgagatgctgtctccgctcagagccaggtgcaggggagaactgtcattgtgtggagtcactgcacaccgtacagagagttccaagaaagctgggggccagggctacacagaatgactctgtctcaaaaatagcaaaaaataaaaagactccacacacccacccacccacccaaagcaaggaagattcgccagcagctcatctccctgaacccgaactgacgttacatcaccatgtgagtactcagagacaaggtccaagttagtaaacagcctgtcaccgtctactgtgcactgctgtccttgggaggcccaacatgggccatgtgtaaaacaagaactgagtctgaagaaacggctcgtggtgaaaagccgctgctgctgacccaagttcagttcccatcacccacatgatggttcacagccatctataattctaggacatggagatcctataccctcttctgacctcacgtgttgcatatacatacatgaagataaaacacacaaagtaaaacctttaaaaaaaaaaaaaaaagaaccactgagcaggaagtgctgagggtgccatgtccctgtgccccggggcaggtggcaatcactatcccgttggctctaagatgcccctgggcgctttttgtaagtatttgttaagatttttaagttactggacacatggtttggtttacctactcttccattgctatctataaactaaacctcatggagtagctggcttgctaaaccatatgaggctgatgaggaccaaagaacccagttgcctatatccccagctaccaagcccatgaaggaaacaaccataacccttgacttgaagttcatcctacacagcacaacccgaaggaactgtctccagagaccaggccaaatgaatcactgggattaaaaaacagtagtacccagaagagacccaagtctatcagacacagagagcagctgtgatcactgggtccaaaacgcacattcacttggcctgagagatggcccagtggttgtgagtgtttacagctctagcagagggctcaagttcccagcgcccacactgggctgctcacagcagcctaggtctagctccagggaatctgtctcttgtttctatagctatagccccaagtgatgtgcatacacctctgtcacacacacacacatgtgcgtgcgcgcacaccataaatttacaaaagaaaaaaagaaagaaccatttttaaaacccagatgtattgccaagagtctgagcagagcattgtgggtaaaaaaaaaaattagaagttgtagaattttgagaataattcactagacgtgtttaagaacagattagacataactcaagaacagattgtaaagcaaattgggagggctgaaacaggtgaagccataaaagaaactggagacattttgaatggagagagaaaaaaatcgtacaactaacagataggggctggagaaatgaacccatggctaaaagcactggctgctcttccagaggacacaggttcaattcccagcacttacatggtggctctcagctgtcattaactccagtttcagagtgcccaatgccttcagtcttttttttggggggggggggatttatttattttatgtatgtgagtacactgtagctgtatagatggttggagccatcatgtggttgctgggacttggacctttggaagagcagtcagtgctcttaaccgctgagccatcttgccagccggcccttagtcttctgatctgcacaaagggcactcacatacgtgcagacaaaacactcaaacgcctagtcaaaataaatcatttttttccttaaaagagggctagagagatgactctggttaggagcacttattctacagggcatgatgatgcacacctttaatctcagcactcaggaggcagaggtaggtggatctctgtgagttcaaggccagcctggtctacaaagcaagttccaggacagccagggttgtcttgcagggagagagaacgctacttcatctccgaacatccacatggtgtctcataacgatctgtaaccccagttctaagtggccagtgtcctcttctgacctctatgagcagcaaggacatatgtggtgcagacaggcagagcacacgaacacaaaagaagccttaaaataaataaaaactattagaggccacaagatagtgatcagctgcctagagctcatgaaaggccatcacgaccaccatataaagccagctgtggacaagagcctgtaattccgtacccaagaggttaagatcagaggagaagttcaaagccatcctcaggtaaatagcaggtctgaagccaccatgggtcacatgagaccctgccccgccccccaaatttaaattaaaaacaaaaacagacaaaaaaaaaatgaagacaatcacgtagggtgcagctaaaattgtatttggaaatgtgtgttgctaaatgcatattagagaagagcaaagggcgaacatcagttatttaagcagctgcctctctcactgtgagttcaaggccagcctggtctccatagtaaataaattcaaggacggccaaactacatagagagactcagttctggggagtgggagggtggggagggaggaaggaagaaaggagaagggagggagggaagaaggaagggagggggagggagagaaaggaannnnnnnnnnnnnnnnnnnntgggaccaaagtggaaccttgttgtaaggactgaggctcgctgatcccctaacaagatccatcagagtagggaaggatgagcatgatggaggagggagagctatgactgggtgtcagaaagcaggagggatgcaagttcagagccagcctgggattcatagtgagacctcctctcaaaaagaaaagtagcataaatttacgcatgttttagaggccacacttaaaccccagcactctaatacactcccaatggaaacatatggtcttgatcatggtggtgggcatacgcatataccaaacacaatcacatacatgttacacgtgttacatatgtgtggtgtttgcaggtcacacatgcatcaggagagcagtgtttagattttgaacaaaatgaacaaactccttattggtccccaaagcatcacacacgggtgacaacgtggagcaaaaaagaattcctgaaccacgtgcaggaatggggacaggaaaaccccagcactgagagtgttcacctgggtactgagagacaggttcaaaggtgcggacagcagaatccgccacagtaactgcagactggaaacgccactggtgaccaccagaagaacttataaacagttacttctgcctaggaacagtcacaaaaaattccagaagtaaactatttataagtttaaagttgctgttgcgtgtcttgatgaagtctgggaacctttgctgcctctggctgttttccaaatgcccgcccacccaggacctggggagggggcagcggctcctttgtctccattatcagttgttatgttgattcactttcattatttagaggctttggtgatggcttccagaagctgcaaggagcaagatacagaaacaaaccagacagaaaactggctgggaaatccagatgtcctctagtaaaccagccgggaggtaagagatttgccaaggcaaagcaatccgccttccttcccatgaatgctttagttggtcttacaatcattctttggggaaatatctcactatcacgccaatgggctccttgctgttgtattctaatgagttaaacattatttcggtttaatttatacataaatgtattggtaggtgtaatctacatgagcagatctttcggagttgctaagtagttttttatggtacaaaaatctgttgatccctgcagcctgcgaacctctgaactccaggccagtatctgggcagatggctctggtttctggtctcagcctctgggttatcaatgcttacaacagaggcttagaaacagggttctgagacagagagcctcctagatacattccagaaagagagcaacctggctttgactaattatgaagctcagccctttgaaagtttgaatttaggaaatgagtcccctccattgattcacacaggatagcactcagatggcccacttgtgatggtggctgcagttgatagaccaagtggtccaggattaggacagtcctgacactggcaaccaaccccatttcatttttgtttatgtttttttttctttttgttgttgatgatgatggttgttgtttggttggttgggttttgtttgtttgttttgtgtgtgtgtgtgtgtgtgtgtgtgtgtgtgtgtgtgtgtgtaaaagggtctcagaccggggtataatgggtatatcttttttttcttttttttctttttttttcaagacagggtttctctgtatagccctggctgtcctggaactcactctgtagaccaggctggcctcgaactcagaaatccacctgcctctgcctcccgagtgctgggattaaaggcctgggccaccattgcctggcaatggggtatacctttaatcccaatgttcatgaggcagagtcaagtggatctctgcacttgaggctagcctggtctacacaggaattccaggccagccagggactaggttacatagagttgtgagtacccatatggttgctgggaactgaactcatgtcctctggaagaacagccggtgctccctactgttgagctgtctgtctacccacctcgctgacgccttcccagacacttccagtcatgctggcctaacagatacctgtgtctggcaagtctattaaaaccataactgtgtagctctggggttctggggttctggggttccatgtgctggcccaagagggaagcagagactgggaagcaaaatggggtgctttccacctctagaaacttaagtccctctccatttgctcccagcttccagacacctccttgtttcctgaaccaccccgccccatgtgcctgccccaaaaggaggtgaacccaaggcccagcccgttgctacctgagtactgtgtgctcattggccttccttcctacattagaggcagtcatttgactgaatactttgccaaggcataatgagagcctccagctgtcccccacaatgggcaaccccttcccacctgcctcctctaagtcagtgctgcagggacccgtagtgtctccaggatgcatgtctacctgagcaggaaacgcaggatgatggacaggaagaggcggcgccccgtgctctgtcccctgcactcggcatacatctgtgtgacagtgcagtcacccaggaaccaagggcctaccttgccacaaggccctagctgctgctagagtgctgtctcccacctcagccaggtggcgctgctggaggagaactgcctgtgtggctcggattgcaggtcaggaaagccttcctagtgcctccctcctgtcatgaaagcccactacatggggcctctagagccaccgtctcttaagtcatttgaactgtaagtgagataacactggcagtgtagacaatgttctctgagaacagggattttggtttctccctagatggatggtgaagaagtgtttattggatgctgccagcagctcacagtttctggaagtgggaagcactcagtagctgacaggcagcattttcttttatgataagaaacgccaggaaggctaatgtagctccctatctgtagttccggtgtctgcttgttcccctccgtcacaagaaggctgctgcagttcctgctgttgcatcaaggtctgatctcatccagagcacagctcagagtgggatcttctccagagcccccctcactttgccatagccaggcctgcttcacacagctgttctcaagctgtcactggccaggagtggggtctgtcatcccagcaagcaggtcaggatcccatgaccctggaggagagtaggtaccaagtccattgatgaagcagggtgggcagcaagcaacatgcagtggtagaagcaagggccaagcctgctgggagaggcgtacctgggcatgcttaggacccacagctggggaggctgcacagagcaaaggaacagatctcagggaaaagcatgtctgcccatggaaggccaggagaggagcccactgtagccacaaccctccccagctcgctctcctccagggtatgcacactgtgcatgcgcacacaggcttcacgctacacacaacacacacacacacacacacacacacacacacaaactgcacagtgtgcgcatgcacacaagctacatgctgcacacacacacacatatatgtgtgtgtgtgtgtatactgtatacatacatgtgatctacatgctaaatacacacacatatgagctgcacactgtacacatgcacacaagctgcatgctacctatatatatacttgtgtatatatatatactgtatacatacatacacactgcatgctacatatatatacatgtatatacatactgtatatacacacacacaagctgcatgacacacacacacacacacacacacacacacacacacacacacgcacaccggagctacccagctcacctcacggatgcttctccatctcccagagtcagcttaataggaaacagggcttggtgggaacaatttatgacaacccaagccctaaaatgaaaacatctgtccctgacatggctcagccgctccccagcacagcctggctcctgaggggcccaccagccctgtggggacagcagaatggaagagccctcagtcagagtttctcaaggcttcctgctgtgtagccaccacgtcatggcctcctagccttgccatactgaccactgagggctgcgactagccaaggagaccatttctcctggtggagacaggctccagcccccaagagcctctttgctctccagctgcccctgtgcaggacctgcctgcccaggtcccccaccttcattccccaagccctgatggctgctatctccttcgaggccaggttcagaaacagcctttaccaggctgat

SEQ ID NO: 828 - DNA, 1766 bp, Mus musculus
taggttctgactctgaagaccttctggaagagttgctctgcagcttggtacagttaatcactgatactccactcttggatatcacgtatgagatagcagtggaggccatctcggcaatggttgtcttcctttcctgccaactcttccacaaggaggttctgcgacagagcatcagtcacaagtacctgatgcaaggcccatgtcttccctacaccagtaaacttgtgaaaaccttattgtataactttatcagacaagaaaagccacctccgcccggaacccatgtcttccctcagcagtcggatgggggaggactgctgtatggactggcatcaggagtagcaagcggggcaggcagcaaagcagctgcgtccccagaacttacatctcctctggccaaccagagtctcctgctgctgctggtgctggtgaacctgacggatgccccagacatacccaacccctacaggcaagctgtctcgtcatttaagaacacgcaagacagcagtccgttcccatcatcaattcctcataccttccagattaactttaacagtttgtacacagccctgtgtgagcagcagacgtctgatcaggcaacgctgctcctgtacacgctgctccaccagaacagcaatgtcaggacgtacgtgctggcccggacggatatggaaaatcttgttttaccaattcttgagattttgtatcatgttgaggaaagaaactcacaccatgtctatatggcccttataatcctgttgatccttacagaagacgatggcttcaatcggtccattcatgaagtgatattaagaaacattacttggtattcagaaagagtcttaactgagatttccctggggagcctcctaattctggtggtaataagaaccatccagtacaatatgaccaggactcgagacaagtacctgcacacaaactgcctggcggctttagcaaacatgtcagcgcagttccgctccctccaccagtacgctgcccagaggatcatcagtttgttttctttgctgtctaaaaaacacaacaaggtcctggagcaagccacgcagtccttgagaggtcccctgagctccagcgatgtccctctcccagattatgcacaggacctcagtgtcattgaagaagtgattcggatgatgctggagatcatcaactcctgcctgacaaattctcttcaccacaacccaaacttggtgtacgccttgctttacaaacgggacctctttgagcaattccgaactcatccctcattccaggacataatgcaaaacattgacctggtgatctccttctttagctcaagacttctacaagctggagctgagctgtcggtggaaagggtcttggaaatcattaaacaaggggttgtggcgctgcccaaagacagactaaagaagtttccagaactgaagttcaaatacgtggaggaagagcagcctgaggagttcttcatcccgtacgtctggtccctggtctacaactcagcggtcggcttgtactggaacccgcaggacatccagctgtttgccatggactcggactgaagcaggacacagccacgcccaccccagccacgcccaggagcagaggcagacagactgcggcaccacagagggtcaaacaagcgtgcttccctcacacactgtgactattgggagactgcgccagttagcagtagttcactcagccttgattgtactgcaagggcgagacaaaaataaacgggaaacgtgctgttcaacatg

SEQ ID NO: 829 - protein, 508 aa, Mus musculus
GSDSEDLLEELLCSLVQLITDTPLLDITYEIAVEAISAMVVFLSCQLFHKEVLRQSISHKYLMQGPCLPYTSKLVKTLLYNFIRQEKPPPPGTHVFPQQSDGGGLLYGLASGVASGAGSKAADELTSPLANQSLLLLLVLVNLTDAPDIPNPYRQAVSSFKNTQDSSPFPSSIPHTFQINFNSLYTALCEQQTSDQATLLLYTLLHQNSNVRTYVLARTDMENLVLPIILYHVEERNSHHVYMALIILLILTEDDGFNRSIHEVILRNITWYSVLTEISLGSLLILVVIRTIQYNMTRTRDKYLHTNCLAANMSAQFRSLHQYAAQRIISLFSLLSKKHNKVLEQATQSLRGPLSSSDVPLPDYAQDLSVIEEVIRMMLEIINSCLTNSLHHNPNLVYALLYKRDLFEQFRTHPSFQDIMQNIDLVISFFSSRLLQAGAELSVERVLEIIKQGVVPKDRLKKFPELKFKYVEEEQPEEFFIPYVWSLVYNSAVGWNPQDIQLFAMDSD

SEQ ID NO: 830 - DNA, 441112 bp, Homo sapiens
  misc_feature (1)...(441112): n = A, C, G or T/U
aatcccagaaatcaccactaaagaacttatccatgtatccctaaaccacctgaacccctaaaactactgaaatttaaaaaaaaaatttaaattgtgcatctgttatatatgtcttttcatttatggtatgtttcataattaaaaaaagaaacaacagcagcataatcagctctctaaaacttaacttaccaacacatctttcctaaattttaattttattctgcaagtaatacattaatatattcgtactgtagaagatttattttaacttgtcttcaacatttagttcatcatcttcaaaaaatggctcccctgctaaactcattagctatgtgatctatccaagcagcaagaagatggccatgccatggcaatcctcttcccattttccctcgccactcagggctcaacagcagggtgaggcttgcggggtggtggtggggggagcacaagggctactttcccccagtacaacatggcatctgatgcttgatgggagagcagaactggtgagacttgagggaagggtccagggcctgtattcagtcagggtcactgctggaagaggaggaggaagaggaggaggaggaatgcttgccatgcttgtggtgcttgtgcatctttttatgagctttcttcattttcttctacatcttcttgtccactatcactcctggtccaaccaagccaggggccaagggattcacaggaggcattccaggggcaggtggtgggtatggaggaaggtagggacccgaaggttggacaccctggctgtggcacaggatgaggacgtccacctggggggaaagctggattgccctggggagctcctgagggaggaggaaaggggcctgggggaaagggtagattgacaggtggtgggtgggcaggattggaacctccagggtacccgatgttggggggatatggatttggccctggctgcctggcattgggattccacatgtttaggtgtgtccttcaaccccatcacctttccaccactgcctgggcttgatgtgttctctgtagaagattttttaaaatacagatagtataaaaatccttcctgacccctcatttggatattttttaatggtgccttttttttaattgttgacgttcaagatagactttaaacaatctgaaggaaaataaatcaatatcaatgacagtcatgcacactcaagcaatctgtttcaaagcctaatcatttgtcatctattctcagtgtttctattataatttttattataataatagtacaggctgaatccccagcacctatagcagtgcctggttcagagtcgatacttaaatatttatggaatgaacactaaatgttctctcaaaaaatgataattcagaaatatctgtatattgcaaaaagtaaaaggtcttccttaccctcccctgctccattctgatgattatgtgaaaggaaaagcctctatccttggtgaatctctcatttagcttttcttttttaagaagttgtgtattctggtggtctttaacagaagagggctatgtgttattgggggttcattgccacctgtaggaggcaaaataacctgtgatgagttggccccattgaagtaccacacctctaggaagccttcccttcctccccttctcttgcccttgtttctgcaagctctgtacaacacttcttatccgggtgaccttgccctacaggtagctggctacctgctgtgtctttcacaggatggtgagctccttgtagacagtgctgtctttatcttgccacctcccacagtgccttggagggtacagttgctaaacgttttggaactaaacagaaaaaaacacagtacaataagaaattaccataatgctaaatcaacaaattactcgaatctcttcccctgacactttagtagctcttgaaagggcaatttcagtgatcttgtcaaacagctaagtcacatggtgacctagaagagggcttggaagtttgagtcattgccgttcaatactctttcctctagacatcctgacccccatcctctgcaaaaccatgggcagtgcagagtaggtcacaagtattgtgtttttatttgtttgtttgtttttagagacgggatcttgctgtgttgcccaggctggtcttgaactcctgggctcaagtgatccccccaccctggcctcccaaagtcctgggattataggtgtgagccaacatgcctggcctgagttgtaaatcttccaggctcgtgccactggcttctgggagactataagatatgacctagtgtaaatggaaataatttttacctatttgggttcaaagacaccaataaatctgttcttggccaccgaggtcagttctatttcttcaaatcttgcctagagtagtgtttgcacctcatgttatgggttgaattgtgtccctccaaaattcatttgttcaagtcctaacccccagtacctcagaatttgatctttcaaaagacaaaattaggattgggtgtggtagctcatgcctgtaatcccagctactcaggaggctgaggcatgagaactgattgaacctgggaggtggaggttgcagtaagcccagatcgcaccactgcactccagcttgggcaacagagcgagaaaaaaaaaacaaaacaaaattacaacaaatttaaatatcttaactgcttttatttacaattctagaatcaagcaacacctcatcctataaaataaaacgggtgttcccaagagctgagcagaggagtttggtccaatggagagaaaaaggctaaggaaagcggaaacagaaaacaaaaagtggattggttgtttcagagttactttcttgttaaggctgaagcagaggggatttccttatcatgccggctaaaactggcttctttggggatttggctattatccctcactctcttcatttctcagatggtcagataaacaaattagtttcaatttggtgacatggaaccttagcatgaatgactccattttggttgggcctagtgcaggagctcagtccaagccaatggccgcctataaattttatttaacaggctttatttggaaataggtacattgtagatagaattaggttataatgaagtcaccagggtgggccctaacccaatatgactggcgtccttatataaagaggaaatttctatgtaaacacacacacagaggaacatgtgaagatgaaggtggatataagggtgttccttctacaagccaaggaatgccaagaattgtcagtagaccagcagaaagtaggggagagcatgaaacagtttcttcctcgcagccctcagaaggaaccaactctgacaatgccttgattttggacttttggcctccaggcctatgagacaataaatgtccactgtttgtggtactttggtatggcaccctagtaaaccaatatacccaggtattacagtcagatattacagtccatgttagctggaaacacaagctaactctgaggaagccaagtgtgagtcttccaacactggcagtgttggcaaaaggagctctgggacagccttttccagtgagtgacagtgtgggctgtgcagctagactgctggtgtgtgagcctccactggctagctttgcaatgttgggaattgtatttaacttgttgcggctgtacaatgggggacaataaataagtaccttgtcttagtccttttgagctgctataacaaaataccacagactgggtaatttacaaagagcaaaaattggacaggcacagtggctcatgcctgtaatcccagcattttggggtgccgaggcaggcggttcacgaggacaggagttccagaccagcctggccaaaaaactccgccttaaaaaaaaaaaaaaaaaaaagcagaaatttatttcacacagttatggaagctgggaagtccaagatcaaggcaccagcatatttggtgtctggtgagagccttcttgctatgtcctcacatggaggaagggcagaggggaaaaaaggcctaggtagttctctcaagccccctgcttttttttttttttttttttttagatggagttttcactctcgttgcccaggctggagtgtaatggtgcagtctcagctcactgcaacatccacctcccaggttcaagtgattctcctgcctcagcctcctaagtagctgggattacgggtatgcatcaccaagcctggctaattttttgtatttagtagagatggggtttcaccatgttggtcaggctggtctcgagccctcttataaggctagtgatcccacttgtgaggagggaggagccctcactccactcaatcacctccccaaagacctcacctctttttttttttttttgagacagagtttcactcttgttgtccaatctggagtgcaatggcactatctcagctcacagcaatctctgtttcccgggttcaagcgattctcctgcctcagcctcctgagtagctgggactacaggcgcacgccaccacgcccagctaatttttgtatttttagtagagacggggtttcaccatgttggccaggatggtctcggtctcttgaccttgtgatctgcctgcctcggcctcccaaagtgctgggattacgggcgtgagccaccgcgcctagccctggtttggtttttttttttagagacagggtctcgctcagttgcccagattggagtgcagtggcatgatcatggctcactgcagctgcgatctcttgggctcaagcaatcctcctgctccagactcccaagtagctaggactacagctgtgcaccattacgcccagctatttttttggtagagatgggggtctcactatgttgcttaggctgagctggaactcctgacctcaagtattcctcccttctcagcctccaaaactattggaattgcaggcatgagccactgcacctagcccccatgttaactattattagtttgtgacttttcctaatttgtcccagacaggaaggagacagtgacagctgcactgtgccccctccctaagttctgccatcagaactgctcctctgacatcttttctgatggccagaaggccaccaggacccatagtgatcaggctgtctcaacctctttccccaggctaggctaagggctcaggaaaaggaagaatgaatgggggctctgtagagtgcatctaagctctcctgcatgcaggagggactggagaacgaactgtgtagcttcttaccttatcaggcaggcaatacccaggaatgctggagtcactgcttttggagcattcaaactctctgcagcactttctgagtcttgctgctaacagctggccttgcaaggaattcattaccatagcaccacaggaggccttagaggacgccggttcaggagcttgctcagtcatttgtgcagctcactggctgtgcatctctgtcggaatcctctcatgtccctagaactcaaatcactaacattccctacgctgttgtaactttattttactacctgttcagccagcctctgcttgaacacatgcagtgattgggatctcatttctcttccacatagaccatttcactactagtaagcttaatttcactgaaccacctatggtgaagtgattcctgagtcattaaataactttctactgcaccctttctcatagggttatttggagacttaaataagataacagtgccttgctcacagaaaacagcctgtaatgtgaattgacaattattgctgctgatattgttttcagaaagttcttatatggagctgaaatctgcattctgtaacttcgaaaacttggtcttaatttggctcattggcataacagaaaataagtctaatcatgcccccctgaggatggttctacttatcacaagtctcctcttagtctagttcttcatactcagttccttcagcccttccacatgggacgtaatttccagatctctcaccatcctgactgcccttccctggacaggttctgtttgaccttcatccctccttggaggagtggccaggtgctggcaactaagacatgcgagctgtccaccatctggattatgcagatgaactaacattgaaaatgacacgctacatgcattacttaatttcgttctcacagcaccttcatgaggagaaaactgaggctcagagatgttaagtagctttccccaaatcgtttagctcagaaattgtggaaccagaattcaacccagatctgtctgactccaaagtctgctcttctttcttggggaagtggaagcctgagtgctgttcttggaacagcctcaagacaataatctggggactgtcttggtcctgcttgcagagggtccttctgttacgtatgggtcctttctggccctttagcttctacaaagaaagtcagtccccctccagctctaaagacacatgaagtctgtttgcagtccagaccttgcaaacttgtagttatagaaacctcagaggcctaccagggcttgaaggatatttggctccactttacatctccattcttcttttcctcctgtttttaatgtaacctgtaatcctagcaatttgggaggctgaggcaggtggatcacctgaggtcaggagttcaagatcagcctggccaacatggtgaaactccgtctctactaaaaatataaaaattagctgggctaatttttaattagtgtggtggcccgcgcctttattcccagctactcaggaggctgaggcaggagaattgcttgaacctggaaggcggagattgcagtgagctgagattgtgccattgcactccagccttggcaacaagagtgaaactccgtctcaaaaaaaaaaagtattctgtccaccacgtggaataatgtaatatttagtaataagaacagctgcaaggtgtagagagttaccgtatatccatcacccagctttccttaacgttaacattttatataaccacagcatcattttgtcaaaactagataatcagcattggtacaatactgttaactaaactctaaacttcatttaggtttcatcaggctttccactattgcctttttcaattccaggatgcagtccaggatatcctattggatttagtggaaggatttcatacattttctattgctgttcctgcactaactagacactgaagttgtcaagtcagccaaagttatcataatactttttttttttttttttttttgagatgcagtctcactctgtcacccaggctggagtgcagtggggcgatcttagctcactgcaccctctgcctcccaggttcaagcaattctcctgcctcagcctcctgagtagctgggactgcaggcctgcaccaccacaactggctaatttttttttttttttttttggatttttagtagagacggggtttcaccatgttggccaggctgatcttgaactccggaactcaggtgatccgcccacctcggcctcccaaagtgctgggatttacaggcttgagctaccacgcccggccatcatacttctgcaggcagttttgaaagttggtgtccaaggataataatttgcacattacatgtacaaaaaaggtgcataaggactgctactctaactcaacacttcctacgtagtaaaaaatattcctaatcttatcttccgatttatgatatttgcctagcaacattataacatttgcctaggaacacaggcaagactgtttatttcaagtcatccaaaaatgaccaaagggagacgatgtaaaatttcactaataggatccccttgaaataaaatattttgcttcttaggtctataaagccagttttgaggagatgctcacaactgttgctgagtcagtctggggaaagtagactgtgtgccaggcaatattaaaaaatattttgagttaggttttcatgcctgagtctctttttttattttttatttttttgagacagagtctggctctgtcacccaggctggagtacaggggtatgatctcggctcgtggcaacctccaccgtctgggttcaagtgattctcctgcatcagcctcctgagtagttggggctacaggcgcatgcctggctaattttgtatttttcgtagagacggggtttcgccatgatgggcaggctggtctcaaactgctgacctcaggtgatctgcctgcttcggcctcccaaagtgttgggatcacaggcatgagtcaccacgcccagccctgagtctctttttgctgtaattttaaaataaaattgtacatgtacttcatattccttgcagaaaaattagaaaacatagggaaaaactaattttaaccacacaggatctcattacccaaagttgcaatattgttaatattatttgtcttttttccaacagcacatatacataggtattataaatattatagtaaacatatattacatatgttatattaatatatcatttaatatattaatataaatattatattaagtggcaaaaccacaattagttttgcaccaacctaatataattcacttatgaaaatttgatactatatatgtttccactcagtgtatcatgaaaatgttttcaaataaatatgcatccatagcattctttacaatgactgcatagtagtgtctatggctttttagttaggtagtttggggtttttttttttttttgagacagtgtctcgttctgttgcccagggtagagtgcaatggtgagattatggctccctgaagcctcaacctcccgggctcaagcgattttcccacatcagcctcccgagtagccgggaccgagggtgtgccaaccactcccagctaatttttgtattttttgttgagacagtgtatcgctatgttgctcaggctggtccttccgaactcctgggctcaagtgatcctcccaccttagcctcccaaagtattgggattacaggcataagccacagggcccagtctactttgggttttaatatgttttcctgtcataattctgcaagctcagtgaatttactggcagtctatgctagaaaagaatacctaatatttgtatagtactttacagagtacactggcacatattgactatataatgggaataacggtgctatctgttccatagggtcattttgcgaaataatagtgcatggcaaatagaaaataatccataatgtgaattgttattactacagtcatgtcaacatttcctgtaatggcagaatcatcatcatgcatatattttaggtgaggaaactggctgagagaggtgaagtaattgctcaaagacgtcagtgtggaaacctcagctcatttgacttcaaattccatagttttggcactatctcatattgctactctttcccgtgggacctgtcctttccgacaactttgcaggcagggctagccctgccagctgcctccatcaaaaattattttgctatttctcaattctccagaatcccacacaatattgcttgactttgggatggttattcagctgcaattaacagaggccttaataaggttaagccgccagaacgagcggtgtagcatgagcgaggactctagcacctggcaggtgaggttgactctagcacccggcaggtgaggtttttgcgcttctctctctctctctttttttttttttgagaagagtcgagctctgtcgcaaggctggagtgcagtggcccgatctcgactcactgcaatctccgcctctcgggttcaaacgattctcctgcctcagacagctactttttgactcactgcaatctccgcctctcgggttcaaacgattatcctgtctcaaacagctactttttgtatttttagtggagacggggtttcaccatgctggccaggatggtctcgatctcctgacctcgtgatccgtccacctcggcctcctaaagtgctgggattacaggcgtgagccaccgcgcacggctgtttttgcgcttctcgatttcgccacgtggctttgcggtagcccaggaggtactaggagggcggaggcacgaataacacccaaaggactacagtttccagaagcccgcgcgcgccgcgtgccacgtgaccacctggctggcgcgcgcgcctgggggtctggtccctagccgcgttctcggtcgcttccctcttctctcgccgcctcctggcctccgcaccgacgcggcccgggctggagccgagccggggccgagctgcaggccggaccggagccggatctgtacccgctgagacgtggaaacatggaggcctgagccggtgtgcgccacctgggctgcggcggcgacagcgacttctcctgacccctctgccaccctcccatccgtccgcgggtccgtggagctggagcagatcccccagccggctgagacaggtgggctgtagcgccgcccccctcagcgcggccgggcccgaaagcctggctgtccccggcctcctgtcagagggggtcaggggccaccctccgcaacccggccagcgccccggggcggcggcgaagggaccctcccttccctgcccgcgggcgcctgggccacccggaggggctgtgctgacagcggacggacctctgtccgagtccgctgttgggagttgggggataccgaaggccaagtcggtgcttccggagatggggcggtgttggtctgacaaatgggcgtgtgatgggcagggtgagcaatagctgttgggtttttctttcttctttttacattcatagtttatcgaggtataactaacatatcagaaaattaaccctttaaaagtacaactcagtggtttttagtatattcacagggttgagcagccatcaccacccttaactccagagcatttttaatcaccgccccccccgccccaaagaagctcgtacccattagcagtcactcctccttctctcccctacactattgatctactttcagtcgccgtggatttgcctgagcaattgtgttttgactgaaaagtgaaagggtgggtgtttgtgaactgggggcagtagtggggtttgagggtattggtgtggtaaagctgattggataaagctgttctctactgaacaggggtagagaagtgatgggatgattgtaatcggccagcaaagcgggtacccaggatagactgattagggggcacagatggagtgagttccttgaaagaggagaggggaagttggagagaggggtgtgtagagcaagggtgatgtgctgaaggatgaaaacctggagggtggaggccgtggagaggaatgtagcgtccaccagaggaactcaggtgcttaggctgatgagttgagggctcaagagaagaacgaggtggaagggaagagaatctataggaatgggtgaatggttgttgcagaggatgaaatttatgaatatatggatttctggagtgattatcctgctttgaagttttattttagataatcctctcagcaacttggagatagaccggacaagtatgaatattcccattctgtaaatgaagaactagtcttttagaggttaggtgtctgccttaagctcataaactgagtacatagggcaaaatgagttggaataattgatgaaactatcagtcgcaagtggattaaatggcagagaactgagttggggcaatgttaataggaaggagattcagctattaagaagtctgtgttgttacgacatataggtcaaggagtttttatgtttttgcaccttttaaccatagaaaagttcacacagtgaaataataaagggtactcccatgtacccattacccagcttcagcagttaactcatgccaatttaatttcatctatgtccctatgcattcctatccccactcacaattattttaaagcaaatcatagacattcaatttcatctgtaaatatttcaatatatatctgtagaagattgaattgcttttttttgttggtggtggtgggaggcagagtctcgctctgtcgttcaggctggagtacagtggcgtgatcccggctcacggcaacgtctgcctcctgggttcaagcaattctcctgcctcagcctcctgagtagctgggattacaggcacgtgctaccatgcctggctaattttttgtatttttagtagagacgggggtctcatcatgttgctcaggctggtcacgaactcctgagttcaggcatttcacccacctcagcctctgaaagtgctgggattacaggggtgagccactgcacctggcctgctctttttaataggcccagaataccattatcacacataaaaattaatagtttttaatatctagaaagatttactgtactttaaaaaagtgtggtaatccatttgatacaaagaggataaacagtgcaaacgcttttatgtttgactctgaaaaatgtggcataattatctcctgatttttccattagatcctgccatcctgattgttccttttttttttattaatatggctcatttttctacagaaagtttgaagaattgtcactttggtaggctttttaatgaatggagggcaggagagaaatagaagtgaaatatgttacaacatgtacaaatggctctttcttatattgctccaaatatttgggcaatttggttatgcttttctagataatttcacatattattagaagttgtttaatgttatgtatcagttttctatgattgctgtaacatgttaccacaaatttagtggcttaaaacaatgcatttattattttacagttctgtaggttagaagtcaaagtgggtctcactggctgtcaacaaggctgtgttcttctctggaggtttctagggggcatctatgcctcttccagcttctagaggctgccactttccttggcttgtggcgtacctcctctgtcttcaaagccaccagtgttgcatctctctgatcatacttccatcctcaagtctctgaccacaagtgggaaaggttctctgcttttaaggacccatgtaattaaatcaggcccacttagctaattcaggataaatcccccctcgaggttcttaatttaatcacgcctgcaaagtctcttttcccagcaacataatcagagcttccatggattagtatgtggacatctttggaggctattattctacctaccacagtgtattttggaatattttgccgagacttaagaaagtaggtgatttcttttgctgctgtacatgcaacgagagggccgtcttttacttaggattgtagataatgggaatggttagatctagagaagactgttcatttttccttttagtgaaatatgggaaatacctgtgacacttgtagtataggctttggtaaaatgagacctttaaaaatgatttaagtataaaagcaatacagctccatgtaaagtttttctatatttcgttttggtctctttttcatattcatgtcttaaaacatagtatatatgtgtaatcagagggctaacctgatacttgacacaggacacgctgggggcaatgatggttcccatgcccaggatgagaaggcagggactctctgtccaagtgggagataaaggcacccccatttcagcagcaaaagaagactcctaatgaaagtgagagaatatcttcaggcagaatgaactactgtgagatttggacttgaagcagcctcttctcaggttcttctgtgactcagctgggaatggtagagtgctgtgagcctagaagagcagagtgataagatgcccattgctgcttttcctttcttcggacagagagaggactaatcttaaagattgaaaggatttctgggagtcctccagtttggtatcctgtttcctagtgggtttcactttcctacttagctgtcaaagtccttactgtctctaggtgtgaaggttctggctttctggtggtggtgcaccatttatcaggaaatgtgatgggacttattaaatatctgctcttgcctttaagcatttttttttctagtaaggtttttagcagagctttatgctttgaactttgcttgtaaacagtttgtaagttatcctcacattacttaattctagacaaaatgaactagtggggctgggaacaactttacatataggtcttatttagtaaaagtttttgtttttttcatttcttaaggaagtttggttagtgattttggtatcttctctgatttttatcacattctttaaaaatgcaggcaatgaaagtggctgaaactttccaataaggacattggaataattatttttaaaaagcttatcttttcttttattgctcagtcttttgggcatttaaaaccttttgtccatcatatgatcgatgacaaatttctttgttaggttgagtcagtcactgaatcttgacaattattccttcaaaatatgtcatgcaaccctccacccagaatactttgaaaaccctacctgtatcagttaggcttaggtttggctatgaataacagagacctgaaaaataatagcttaaacatatgactagtttgtttcttttgtaaaagaagtccagaggtggacgattaaaggctggtttggcagctctgctgtcatcaggaacccagcctccttgtagtttcttacactgttaaccctaaagtatggcccttgatttctgggtccaagatggctgctggagttctagctaaaatttccatgttcctaacagcaggatggaggaagggataaagaagtgactgtccactcttagagacttaaatatatcttagttgaacaggaatatgcctggtcaaaaaaatggagttctgttactaaaaggaagagaggactggagattgggtagggaattagcattttttgcttttttttttttgagacagtctgactctgttgctcaggctggagtgcagtggtgggatctcggctcactgcaacctctgcctcccaggttcaagtgattctcctgcctcagcctcctgaatagctgggattacaggcatgcgccaccatgcccggctaatttttgtactgtttttagtagagttttcaccattttgcccaggctgtctcgaactcctgacctcaggtgatccacccacctcggcctcccaaagtgctgggattacagacaggagccactgcgcctggcctctgctcctttataattaatttctctgaacccagactaacctacatactttttgaaactctaggtttgagtcctagttctatcatttatttgctttggcatgttactcaacctttttgaacttcagttttcttatctgtataatgggactaatatatactttatatgtttgttagagaattaaatgaaaatacctctatgtacctagcaatatatacactataactattagttgtttttcattctcttcctttagatttctcgacttggatatctgaatgagtggtgtaaaaagatgagaattagagatggacaaggagaaggatgtatattcagttcagtattgagcatgtggagtttgaggtgcccttgggacatcagatggtgatagatgttaggcagttagataaacgggactgacactcaaaagacagttctgactagacatagatattttggattgtaagtgtataggggtagaattcatcaatctggaagtcttagggaggatgtatgcagttgtacggttactatgtgcggagtaagaaggcatgccctttagtgagtctctctgtaaagcgtcaagcctcagcttactttctggccttttctttattatttttatttttttgtgggttaaggagtggaaagtctaatagaagaaaggagagaggagagcagctccttgagagagagagagagaggtccaaaaaaggaggaggccatggaccgcagcagatttttttttttttttttttttttgagacagagtctcgctctatcacccaggctggagtgcagtggcgcgatctcggctcactgcaaactctgcctcctgggtctacgccattctcctgcctcagccacctgagtagctgggactacaggcgccggccacaatgcctggctaattttttttttttttggtatttttagtagagacggggtttcactgtgttagccaggatggtctcgatctcctgacctcgtgatccaccggcctcggcctcccaaagtgttgggattacaggcctgagccaccgcacccggcctgcagcagatttttatatggagaaggcagtgtctgatttacatagggctcacagattggttcgatcatgcatgacgtctacagagtgtgtggggaaggctggttgcctcaacctaatcttatgcaaatgggctttccagttgattggcaccatcctgtctgctcctttacagtacatgtggctggcagagaagggaagatggagccgccattttgaaaatgtctagtccttagtttctgcaggcattatcgtgtgcaagctcccagcttgcaggctgctctttgttagaaaatgatttggggctgcttttcattaaaaagaacagccttactgaggactcccatgcccttgctatctgcctaagtaattccttgttaactcctatatcatcattccctgctctggagtggcaaccctaactgctgttagggggtgttgggtgatgactctttctggctacttcctgctgaaaaggggcatcatgtggggatcagcagctagggctcctcctggggtcaatctaagggtccttggaagaaaggcatgtccgtgtgtggttctgtctgcagcatcatttggagtttgattctgttgctattctgatgggttgtaacactggtttgcctccaccagatgttgttgaaatgttaatataaaagtaacattccttttaggataagtggcattggatttgggtggctggagtaactttagtgttaaccttggctagatctttcctgcagttatcaatcccttcatgacttccacagaaaatctctttcctttataaccttctttgcatagccagggtgtgacatattaccaaacccaataagaagttctagcaaactcggtgttagtaaaactttcgtgcttcctttttgttggtaattatccctgctatcaggataataattaagcaaattctacaacaatgaaaactctctttccagtatttcagttagaaggtgctattgtgtccagaattggtgggttcttggtctcattgacttcaagaatgaagccacggaccctcacggtgagtgttacagttcttaaaggcggcgtgtgtggagtttgttccttctgattttcggatgtgttcggagtttcttccttctggtgggttcgtgctctcgctggcttcaggagtgaagctgcagaccttcgcagtgagtgttacagctcataaaggcagtgtggacccaaagagtgagcagcaacaagatttattgcaaagagcgaaagaacaaagctcccgcagtgtggaaggggacctgagccggttgccactgctggttggggcagcctgcttttattcccttatctggccccacccacatcctgctgattggtccattttacagggtgctgattggtgcgtgtacaatccctgagctcgacacaaaagttctccaagtcccccctagattagctagatacagagtactgattggtatatttacaaaccctgagctagatacagagtgctgattggtgcatttacaaaccttgagctagacacagggtgtggattggtacatttacaaaccttgagctagacacagagtgctgattggtgtatttacaatcccttagctagacataaagattctccaagtccccaccagattagctagatacagagtgccgattggtgcatcctcaaaccctgagcctagacacagggtgctgattggtctgttcacaaaccttgagctagacacagagtgctgattggtgtatctgcaatcccttagctagacataaaggttctccaagtccccactagactcaggagcccagctggcttcacctggtggatcctgcaccagggccgcaggcagagctgcctgccagtcccgcgctgtgcgcctgcactcctcagcccttgggcggttgatgggaccaggcgctggggagcagggagcggcgctcgtcagggaggctcaggccacgcaggagcccacggcagtgacttggagaacctttatgtctagctgagggattgtagatacgccagtcagcactctgtgtctagctcaaggtttgtaaatgcaccaatcagcactctgtatctagctaatctggtggggacttggagaatctttatatctagctcagggattgtaaacgcaccaatcagcaccctgtcaaaacagaccaatcagctctctgtaaaatggaccaaatcagcaggatgtgggtggggccagataagggaataaaagcaggctgcctgaaccagcaatggcaacccgctcaggtccccttccacactgcgggagctttgttctttcactctttgcaataaatcttgctgctgctcactctttgggtccacactgcctttatgagctgtaacactcaccgcgaaggtctgccgcttcactcctaagccagcgagagcacgaacccaccagaaggaagaaactccgaacacatccgaacatcagaaggaacaaactctggacatgccgccttgaagaactgtaacactcactgtgagggtctgtggcttcattcttgaagtcaatgagaccaagaatccaccaattccagacacactgccatgtataaccctactgcaaatagtagagtgagtatagcaattcccacaagtgtggtgtagtagatactttccatctaaaattttatttgccaaggtatccagatttttgtgttacccatctctttttgtttcttgtaagcttcaggagatcaccacttgattcacaggaataagcagtgttagtctaaaatgtaggcacacaacttaaaaacaattaatgtgactaggatttaatgacaaatgtatgataagctttggagcatattttctctctctagtcctgattttggtaaaaacaaattatgataggaccgtgttgtttgtagaataaaccttagtcttatatttggccttgttatttgcataaagttcagcaagagtaattatttctgcatagtccttttggattggcttcgatggaactctgttccacaagaaatctcagataagacttcttaaagctgagcccagcatgggtttgtatcttcaaatacctgtgagttgggtgatccttttctcttaaggtcccaagataaacttggagctcctggacctgttagaaagtgacattctttactgaccaaaggttaggaaccctgtgcggggactgtgtagacaaggtatgaggccagttcttcccatggggctttttcagctctgcaagtggaggttgactccttaaagggaagcatacacttccagtcaaagccttgataaaatagccagtttttccatttgtgtcctgttgaaaaagaaaaatggattcttatttcactgatgcaaacaactatattgccataagttaagagttctcacagattagaggaaccaggcagagagaaacaatcatgcttcaagttttgttcacaggagtataccttactcaattattaaaggctgtaaatagttcaaaataagtttccttgactctgaaaaacaaaccaaggatcagcaatattccaagcagaagtcaaaaagattgctttagctttctgagtgtagtccatttagtcaattcttgttttgcttgatatttgtgaacatttcagttcatgagtcctgtacgttctttctctcttccaatgttacaatcttcaaagctgttaaaaacctgcatttgaggacacctgttgaaagtccttaatatagcttgattataaactgtcttttcagaaggaacaaagcaaaacaacaattgtctgtgcatgacaaaatttccaggttacagttaaaaacatgacggaaaaagtttagttaaccttaattatgattgatagtatatacttagacattagaattttagaaatcccatacaattttggaacatatattagtattattcaccaaaatataacttaaagaagattggacatcgttttggcaattctaatgtgactaaacatgtcagataatcctgtttacctcttctctggatgtttcaggggccttctgaacaatccagaaagccaggcatcaggaaggacaattttgaaacttgaagcttgattttgggatgccttttaaatgttagaggtttaaaacacttgatgttatgaaatagaattccaaattgccattatttattttgccaaaatgatgtcacaaaaggaaaaaatctttcatcatcctttactattacatgaaaatcctgtttaaagccaaattttacccttgtattagtttattaaagttgtaaacaaccttttgataaaacctcataggaaagttcacctaatcttaaccaatgaccatggggtgaagtctttacaaaccctttacaaccccttttgttaaacggcagattagtgtcttaagacagccttgccgtgtttttctttcaatgctcaatttaggaaaagaccatataatacccttttgaatttagttaatgtttatacatttttgcaagattaatttttgtcttcctgtaacttgcttaaacctttagctctgtcttattaaatttaagataatctcttatccctgggcaaaatttatattttcatgctttcttataatcttttactaaaaaacacatttcactgtttttataagccttgcatataaaactttagagatctcaaatacatgttgcactgttaactctcagcaacttttactttaggtaaaaaacctggttagtaagtgattttaattatataccaggtgtggagtctaggacccagacaaagtcaggcttatggggtcctgggcctgcatcctaacctaaggtaccctttcttttgacagaacgctacagaaagacacacaaagcacaccagattggttacagcttaagaccaacctcacaaattcttttttattaattaaaactttacagagaataaacaatcatccttattatccttgttactggtttgcacaggaagagataagccaaaatgttgactggtaaaaaaacttttacccttttgccagcatgtcaggcttctgggttcccttcccattagctcaactctaagtcaaccattttaaggtttggggaaattaacttttcctactttggaggaacattatacaggaagagataggaaccattgtacactgtgaaagaaggaaaaacaccatagaaaagtctggggattccagttagggttgtcaagaggtaccgcctctcttcctattgggaattgtgtttctcttatttctttgccttccctattttctcttttcgttttaggcctactataggaaacgttgcttatctttcaatttctttgctgcctgctcttcagctgtaattagggtttggcttagaagcaacataaaatctcttcatgagaggtgaaacacctgagttaaattttggaaagcttctatatacctatcagggtcttcagaaaattggcctcagtcacctttatttgcctaaggtcttgcaaagaggagggaacttgaaccctagtgacatcacctccattgggcatttcctgtagaggtaagagtgaaagtggggagtgggaaattttggagatggtggaggtggaagaactggtggtatggttggaggtggccctaaataagggggacttgaagggctgggacacccaatagctgcctcagatgatttccccagaagttgcttctctcattttggggaattattctctttgggcctgctcaatatgattgctaaaagggctgggttaattctgtaacgcttgcaaaggtctagtaaaaaggccatgccctgtgcaaaagaaaatgagctgctttttaaagtttcagggtcaaagaaatccttgtgcttcagaatgcactccaggggagtgcaggatgaagatggtacccacttagagaaaaaggtggccctttagtctccttccttttggtgtgacccatggtggagaggaagcagtgggggcatcccccctgcttttttccccctgtgtttcctgggtcccaggcaccttgttgaacatgctgcccatggttgcaagtgtgacccccagtcatggaaccagaggaactaagtcactggggctagtcatgctcacccaagtggctgtagtcctctgcctgtgatttccctttaacttcctagacttgtgtgacttgcctggcttcctgaaaaatggatttcaagaaaaactacataatagttgggcaaggcccctttaatgcaggggatgtgctagattgaactctgtatcctgctattatggcctgtgctgaagcatttacccttagataatggttccagttaacttccaaacttaaaattcccttactaattaagtactactctaattgaaggcagaataggtggcttaaaaaaacttagggattgaatggccattttcctgctgatgagacagtattgagactaaattttggctttggaggaatattttacccctaattgttgaaggcagagttttctcatttacagaaccagcataaagcctggtttctagtagagaggcacaaaaaggaaagagaattgggaggctaggatgtttcgttggactgacagtgtgcttcatggagaggattcctatttcactaggtggcgctgttgaccttgaaacaccacatactctctagaccaagggcagagagagacctggaaaatgccatgtgctctccagaccaagggcagagaaagagagattctcactgttggggggtcagggagccctgttcttagaaaatcacaaagacgcttccccttgagctatatgccttgttactacgacattccctgatcttaccaaacaagactacttccctgaaccataaaacttcccacacatttcatacagagaggataagagatatgacggttgcgaacaggagaggaggagattacaataggaaagttggagatcctgttgccgacaccgcattggggcggttggcggctggggtccagaagcctttggataacaccagggggtagcgccggccagaaatcctcagttgccccaggacttcttccagccccacacgacagctaagtcctccatgaaaggtctaaaatggaagccgagaaccttggaatgaaaggacagagttagagttcgctcttccccttaccgttcttatgaatgttgtaccttggtatcccggacaaagctgccattatgaagtggctacactatctggggtgtataccctagggtttgttgttgcctgccgagaaagaattaggacacggacatgtgggtgggttaaggagtggaaagcttaatagacagaagaaaggagagaggagagcagctccttgagaaagagacgtgttcgaaaaaggtactttctggtctcttatgcttctgctttgattccttttctgttccagccatgttaaacttctttcaggtccttgaacaggccctacctgttatttcttaaccacagggcttcacacgtgctgttctctgctttggaagtttctgaactcccacatccacccaggccaacccttcttgtcctttaggtcttaacattttttttttttttttgtgatggagtcttcctctgtcttgcccaggctggagtgcagtggcgtgatctcagctcactgcagcctctacctcccggtttcaagtgattctcctgtctcagcctcccaagtagctgggattacaggcgcctgccaccacacccagctaatttttgtatttttagtagagacggaatttcaccgtgttggccaggttggtctcgaactcctgacctcaggtgatccacccactttggcctgccgaagtgctgggattacaggcgtgagccactgcacccagctggtcttaacttttatggtatgaactcttggaagctttcccttggaagcttgaatagttgccatcttaacatttcttgttgatgtatccgtatctctgtatatcattcccttcttcacaactttaaccttggcactttgcatactgctggccacatagtgggcactcaggaaatatttattgactgttgataggcttcttgtgcttaatgtaaccataatgtgatgtagcttatatatggcttatttggtttttcaaccctgtacttgttctttagtatttgcacattgaattgtttatatgaatcattgattatgaaatagtaaagctcattctctcttatttattttgatattttttctacttaaagtaatacttgtatattgttagaaaaggtaaataataataaaggcaggttataaaaaatcagcagtatccttacccatccccactttttaatctcattttcagaggcagttacttttaagaactctgtctctctctctctctttttcttttggtagagatggggtctcactgtgttgcccaggccgttcttgaactcctagcctcaaatggtcctcctgcctgggcctcccaaagtgctgggattacaggcctgagccactgcacctggccctaaaaattcttttaagctttttcttttgattcttacctctgcgtttataaatctgcctaaattgctattttgtgatttatcaattttagataatacatattaacttcttgttatggtaggtggggtattcttccctttccttcccctatttctaaaagcacttccagtataggtatataagaattcttggttaatatagtgtttagcttttatattattatgactacataaatattgttcactgctggtgagtacttcaccatgtttccccttccctccccctagtttgcttagttttccatggatatattattaatttttaccaaatactttgaacggcctgtgggatttagtgcctaagaaattgatgcaaggtgttactctggctactgctattgcagttgttttgtgtccctgttccagaggtttcatgcctttttcagctttgtcagtaaagtaaaatctcagatccccaccatgcctgacttgacagtgtaacatcccccattttgtttgtgctttctttttggaactgttactattaatatattaaaatcttctaaattgttctttaaattttctattttttctcctcctgtttttcacttatttgtcctcttgttctttattatgggagttcccttaacttttatcttttctccgttcttttgttttaaatttcaggtgtcctttcttgttctttatttccttttttatgacatcctactcttgcttcatgaagcaatatgaaacggttaaaagagaatggtttctgtacctatcctacctgggtttaaaacctgatgtgccactttctagctctataatcttgggcaagttacttaacctttctttgctttagtttattcatgtaggttaggagttggtagacatttcatctaaaggaccaaatcataaatatttcaggctttatcagccaagaggcaaaatgaaggatattttaaattatttaattatttcattatgtaagtacttacataacaagagagaaaacatttctacaagttttttattaataaagctcaaaatgcgatactaataatgattgagaacaatttttgcaataaaggtttgctaatgagaagaatgaatgtttttttggaggagaggggataacatttggcttaattggagtttaaagttagtgttctctatcatcaaaattgattatagatgcagcattaaccacctattaatgctgatttgtaatgagatttcatgtatttcatctttgaaaatgtcttcttagatactgccaaatactgctaatagtctgtgaacatatggttttaatagagcatattcattgcttggacgacatttacagaattcttttagactcttttcttgatacttaacgtttagcaaatcattacactgcagactaatcacttccaattgaggattaggtagaagctcctcattgcacagttaaatgatttttgaaatgtggaatgttcgtttctacttgcattgaggtatgaaaaaatactgctggaaatatttgattttggaaaatatgtctgctgcatatttgtgtggcagtagagatcttcttattttaatttttgacagcataggaagtacatgaagcatcttgacatgacttgtgacttaggcaatgttagttgtccttgaaatgactgtctcaatataggttttgcacgtagaccctgttgtccttctaactttaggctgaattcattaacagatatatcaagtctgcagcaacaatagtagttgagggtcattcttttcattcagaaaaatttgtctcagcctggagcttgaaacatttcagtaaaactctgccattgttaagccattgtattgtttcgtggcaggacgcgtcaggatatttagcttctatttctgacaaaaatgtcatgagaacaaatgaaatttacctgtgacattacggttcaataacacatgatagattcagatgttttctgcagagtacctgctgattgagaatatgattaatagccataagctttaaacaccttacatttcacaaggcttgtaaattttgtccagctaagcctttttctgcttcatacatatttttaccaccatcagttgttacacatcttagcagattctacttcagattgtgctgaattagtatttccttgattttttggaaaatattcatagctgtaattgtttcatacatactgtacttcgagccactgttttcatggaaagagtaggatgttaaagatatttattttctctggacacaattctttggctgctgtaatcaaacacaatttaattaactcaccattggcaaatactttccttgcttgcttaacaaatgagccatttggaaatttacttcggttgcagccctatttccatttttaatttttggcaagacattctgctctgaggaggtatatcttgttttacatttgcccattttcctgctcattgctctcatgagttgggagtgaatgctgtgtggcagggcatatcgggatattgtgatgagtgcttagtctagtaatacttcctatattgtattttgctggcacagcttcgtgatgcttttacataataaagtactttgacatctaactagatttaaacaatctacagtccactgtgacttacaagtgtgacatcagagtacttctgtttttttgacgtgatagtcactggtaaaatagttatagtatggcaatactcatgacacttgaaatgctgttgagtaaaccgtgtcattgagatttgtggtgcactgagagtataaagggatgagggcaccaaatatgatctctgtagcaactacccaagtctgctgttgtatcaggaaaacagctatagaccatgtgtaaacaaatgagcatggctgtattctaataagactttattgacactgaaattttcttttcatataatttacacatgtcacaaaatattcttttgatttttttcaacgatttaaaaatgtaaaaatcaggttgggcgcagtggcttatgcctataatcccggcattttgggaggctaatgtgggcagatcacctgaggtcaggagtttgagaccagcctggccaacatggtgaaacctgaaaatacaaaaattagccaggcatggtggtgcatgcctgtagtcccagctactagggaggctgagatgagaggattgcttgaacccgggaggcaaaggttgcagtgagctgagattactccactgcactccaccctgggtgacagagcaagaccctgtctgaaaaaaaaaaaaaaagtaggaatcattcttcaggcagcacatagggtttagcccttgggctgtaatttgccaatttatgatttaggcaatgagaaaaaaaagtaccacgccatagtttgtggtgagtgtaaaatcagttagtatatgtgaaacagttaagatggtgactggggacatagtaggtgctaaatacatgtttggtattattgttactgttttcattattatctatctaaagatattttagtttttaattttttcttagaatcatctgttttctatgattcctttctttagtttgtttcagtttcttttttttatttttgagacaggatctccctctgttgcccaggctggagtgtggtggcacgatcacagctcattgcagccttgacctctcaggctcaggcaatcctctcacctcagcctcccaagtagcaggaactataggcgtgcaccaccatgtctggctaatttgtttatttttttgtagaggcattaaaaatgtctctgtgttgcccaggttgatctccaagtcctgggctcaagtgattcttttgtcttggcttcccaaagcgctgggattctaggagtcagtcaccatgcccgggctgctttggtttctatatttcatgctggagactttactcacaagtctaatcatttttgactgtccattcttatttaaagttgagactacccaaaaactgattggaagctctttgtgtaagtagattttgttgagtggtgggcattgctgtgaggtgacgatctattttttaaattggcctggcagttcctaaatttctgtatcttttccctaggttcctattcagtttctcttgagaggaatccttcagtctcctgccttggaggcagggaaactcactgtggagctgtagcaagttgactttatcttcattctcttgttttcttcattttccaccttattaccctccccaaccttggcattggtctctctagttgtatttctctgggaagcacgcataatagtctcttcctggggagagagacccccaggctttagtcctgcaccttgccccgtcttccccagtgccctgtctctcgctctttagccttcccacggctccatggggtgaattgccttccttcttgttggtgtcccccttggcaggaactccttttggggcttcctcaggtcggctggttcaggtacactcctctgtcaccttcccatcttccacacttcccttgatctgatctttgtgggtttatatctttctttccattgctttcgtttcattgggcggggaatacccaactgtacttaatatagcacttggagcctagttgcctttcagagaatgttctattacttgtggactcatggcacctgtggcatttactctgtcctttggctggtgattattgcccattatttctctgatctcctgtttcagctttctccttaaagtctctgaggtacaagtggggcatatatgtgtgtttgtacacacaatccatatatataatataattatatattaattatatataattatattatatataattatatattaattatatataattatattatatataattatataatatatattatataattatatataacaatattatgtatattatatataatataattatatataatatatataatatataatatattatatataaatatataattatataatatataatatattatatataaatatataattatataatatataatatatattatatatataatatatattatatataatatattatataaaatataatatatttatataaatatattatatatattatatatattatatataatatattatataaaatataatatatttatataaatatataaaatataatgtatttatataaatatataaaatataatgtatttatataaatatataaaatataatgtatttatataaatatattatataaatatataatatatagtcatatattatataaatatataatatatagtcatatattatataaatatataatatatagtcatatattatataaatatataatatatagtcatatattatataaatatataatatatagtcatatattatataaatatataatatatagtcatatattatataaatatataatatatagtcatatattatataaatatataatatatagtcatatattatataaatatataatatatagtcatatattatataaatatataatatatagtcatatattatataaatatataatatatagtcatatattatataaatatataatatatagtcatatattatataaatatataatatatagtcatatattatataaatatataatatatagtcatatattatataaatatataatatatagtcactttactcctaaatatatattatatagcatatataatatgctatattatatatcatatataatatgctatattatatatcatatactatattatatatcatatataatagtatatgtatatttaggaggaaagcgattctggaatagagtgtagaatttgtggattatcagcctgagaagggacaaagggcattagggcatcatttacacattttgagggtgttagaacagaatttggttatcatggattttcagatccactaatgtttactttccatttaaggcacatcaaatcaagagatagtcagtacacataaaagaggagattgactttatgtatttatcaaatatttcacaaatataaaatattgagcatatcatgttttatttatttatttatttatttatttatttatttatttatttattggtgacagagtctccctctgttgcccaggctgaagtacagtgacatgattgtataatagctcactgcaacttcaaaatcctggatttcaggtgatcctcctgcctcagccttctgagtagctgggactacaggcttattagctgtgttgcctggctaatttgtaaattttttgtagagacagagttttgctttgttgtcaaggctggtcttgaactcagcttctggaaatccttgtaccttagcctcccaaagtgctggaattacaggcatgagccacagttcctggcctgttaccaagtattttttaatgtttactagtttgatgggtaaaaatgatatattattgttttaattagcatattgtactcagaatttagtctgaagatcttttcatatatttattagctgtgagaccttggctatttcagcaagtattttttgagtaatttctctttagcagtatgctggagattgattagggataaggaagaagtgtaaggcctgattcatgcctctcaggaataatctacctggggagatatgttatatgtactacagcaaaataacatttcaaggcagcttttacgtaattgcagctttaggggagtagtggagagttttaaggggtaacagggaggaatgatagaatcagttttgcacatgttaagattgagttcttgactacattgcattgaagataggtcctttgaaaggtttactactaaaagcatcagcaatagcctacttctcatttctagcatagagttacataaggatcattgttaccaacaaacttactgattatattatatatattacccttgagttaaaaaaagtctgaaatattttagagatatcaacagaactggcttcctggccagaggttgggtctagaaggagaaatttgaaagtagtatcatggaagccactagaaaagccaggagatgggatcagttactgacagatttagagaaagaagagctggaagccaagggagtctaatgatgcccagtgagggcaaaggcagtaggactctttggagattatccaatagtgttttctactttactctagttttcattgataagggtcttgagagttccaaataaattgggagccgacgattgtgcgtgtgtgtttggaatccttggcaggaatcattgcagaagagatgccattggggctcagttttctactttgctttttgtgggggagcaggtggatctttctggcaagagtgcctcagtggctactggtcttactatgtctgaacttattcctcctgtatactccaggtgcccagggtgttgccttcactctgttcctagcaggtagcaccctgttgttgcttcctgtgggagtgagggcttaggcaggggtgtctgctcaggtgcactagccaagcttctgttagttgcttgtgggcctttttctggcctttctgcttttgtgccggagttcctgttcacactctttgggatggtgcccttgaaggcccttgagcctgctctgggatgctatttccctttttagcccatctccagctgttttctactttatggggattcttcacagcttctggccgcctgttatttttttagcatggctgtgtaatcactggctatttaaaaaaatatgatttatattatttctagggtttggtgagaaaaaacggggaaggaggcactgtactctttactcaattggctgtctcgattttttttgttaacattctgttcagtgtctctcctgatatgcttgtaggctttattcatactgttttagaaagatttcatagtgttcttggactgagcagttattttgatttattaattttatttttgatacaaagtcttgctctgttgcacagtgcagtggtgtagacgtggctcactgcagcgtcgaactcctgggctcaagcgatccttctgagtagctgggaccacaggcttgtgccaccacgcccagctagtttttaaattttttgtatagatggggtcttgcccaggctggcctcgtactcctgggctcaagcaatcctcctgctctgtctcccaaagtgctgggattacaggtgtacaggtgtttgatttaagacttaattttgtggtctatcctagcctctttgaaaataaagtttatttcctataaaccaatagaaaacagtcataggatatgagcaggtaatggtcttattcacggcaagagagatgcaaaataaaattgtattgaaaaactgctttttaaaaaaaatctaagttggcaaggatcagaaagtttgattaaacaatggtggctgtggagtagagaaataggcgttgctggtgagaatccaagttggtacaacctctgtagaaggcagccaggcagtatctatcaaaattacagatgcatataccctttgacccagcaattctatttctctggatttatcatatctgtctactcatacatgtgtgaaatattttatatgcttatgtaagtgatagtataagatataagtaatgtatatatcttattggagaatgacatttattttttattacttggagaatgatttgtaatagcaaaagatgtagactacctaaagtccatcaatatggtatttgagaaattataaaatggaatgttacacaattgtaaaaaggaatgaagtgcttcatatatggatatataatgacttcctatatattgatgagtgggaatagcagagtagagaggaatatgtcatatgctatggtttgtttaaaaaggggttgaacatatgtttgtatatacacagaatgtctgtggaatgatgcccaagaaactgtgaatgttttctctgagttgagaaggtggttagaagatgggatgggaaggagattttcactgtctatcctttgaagcttttgtattttgtaccatgaatattactgatacaaaaagaacataaaataaacagaaacatctgacaaattttgttagtagactctttgatagtattgtttctcgttgttgcttcacctggtgggaggaggaggttgattccaaaatcaaattttgttcttttgaaaattcagcattcatgtacttaaactcctagagtaaaattgcttgcttttaagttaccacacaaaaaaagtaagatactggtctatttaactgagaacaaattgttatgattttcatttcttttgatctggtgtcatttttttcctgttaattttaatgaagcacagagaaggaaaattgagtacatggtagagccaggaggacccatatttaaattgctgtcagcaaaccaacactctttgaactaacccactttcatccatacagttagaggtacttattcagtacactaatattagacctacaatcctaactgctaattagcatgagtcccctgataaatagcacactgtaaacaagtagtcaaggtcttttttactcgtttgtttaaacatatggtttattgaggcatattcagggtcacagggattattggacaaataaaaataatttgaaagctttggctaaaaaggaactagcaatatccttaaggaggtggtggaagacaaaatctgttgtatactcctcagagttaatgaaattaatgcagaatcccagaggacccaagaacattacttattttgcttttattgaaaaagttcaattttgaataaaatctgaaagaaataatttattgggtagctgggagaggtggctcatacctctaattccagtgctttgggaagcctaggcaagagggtctcttgaggccaggagattgagattagcctcagcaacatagcaagacgcccatctctataaaaaatttaaaaaagttagcagggtgtgatggcatgtatctgtaatcccacctactcagaaggctaaggcggaaggattgcttgaattcaggagtttgaagctacagtgaattatgttcatgccactgcactctagtgtgggtgacagagtgagaccctatctctaaaataagtaaataaatttattttggaaaactagtctaagtgaaagaacattctgtaataggacaccgagtaactagaatatgagatcctaatatctcatcatgtttaatatggacgatgaagtaacaatatgtaaaaacaatcctagtggttgtgaaagaaagtacctattagtctgatttgttggcacctctctgggacatgtagattcttttttgtttgtttgtttttgttttttttgagatggagtgttgttcttgttgcccaggctggagtgcaatggcacgatctcggttcactgcaacctccacctccagggttcaagcgattttcctgcgtcaatctcctgagtagctgggattacagacgcctgacacttcacctggctaattttttgtatttttagtagagatggggtttcactatgttggccaggctggtctctaactcctgacctcaggtgatccacccacctcagcctcccaaagtggtgggattacaggcatgagccactgtgcccggccttgtggttttaattgagcattttatgagattagatttctcttttcttagcatttcaattatacttttttttttttttttttactgttttagtgtttaccctagagtttgtaatctacatttacaagcaatccaagattgcttttaaataatacaataacaacatcaccacttcacagtttgcacaataccttataataacaaagcattcctaattctttctgcctgtctgttgcattttcagttcacatatacattgctgtccttcatttcacttcttttttttttttttttttttgagatggagtcatggtctgttccccagactgaagtgcagtggcatgatcttggctcactgaaacctctgcctcctgggttcaagtgattctcgtgccttagtctccctagaagctgggattataggcgcacaccaccatgctgtgctaatttttgtatttttagtagagatgaggttttaccacgttggccagcctggtcttgaactcctgacctcaagtgatccgcctgccttggcttcctaaagtgctgggattataggcatgagctaccacacctggcccaaaagtttttaatttgatgaagctcagtttataaatttttttcttttatgggttgtgctttttttgttgttgttgttgaaatctccatgcaccaccacacctggctaattaaaaaattttttttagagacagggtattgctatattgcccaggctggtatctaacccctgtcctcaagtgatcctcctgcctcagcctcccgagttgctgtgattacaggcgtgatccactgtgcctggccagaaaatattttatttttaatcaaagtagtatatggatgtgattttgaaaagtcaactaatatgacaaacttaatataaaaaactgctctaccaccctccccactccagagtccttttccacaggggtggccactttctttttcttttttgttttgtttttttgagatggagtttagctcttattgcccaggctggaatgcaatggtgcagtcttggctcactgcaacctccgcctcccaggttcaagtgattctcctgtctcagcctcccaagtagctgggattacaggtacctgccaccatgcccagctaatttttgtatttttttttttttttgagatggagtcttgctctgttgcccaggctggagtgtagtggcaagatctcagctcactgcaacctccacctcccaggttcaggtgatccccctgcctcagtctccctagtagctgggactacaggcgtgtgccaccacacctggctaatttttttttgtattttagtagagacggggtttcaccatgttggccaggatggtcttgatctcctgacctcgtgatctgcccgcctcggcctcccaaagtgctgagattacaggcgagagccactgcacccggcctgcagcagatttttatatggagaaggcagtgtctgatttacatagggctcacagattggttcgatcatgcatgacgtctacagagtgtgtggggaaggctggttgcctcaacctaatcttatgcaaatgggctttccagttgattggcaccatcctgtctgctcctttacagtacatgtggctggcagagaagggaagatggagccgccattttgaaaatgtctagtccttagtttctgcaggcattatcgtgtgcaagctcccagcttgcaggctgctctttgttagaaaatgatttggggctgcttttcattaaaaagaacagccttactgaggactcccatgcccttgctatctgcctaagtaattccnnnnnnnnnnnnnnnnnnnnaccatagcgacgggaggtggaaaaaccaactaatatgacaaacttaatataaaaaactgctctaccaccctccccactccagagtccttttccacaggggtggccactttctttttcttttttgttttgtttttttgagatggagtttagctcttattgcccaggctggaatgcaatggtgcagtcttggctcactgcaacctccgcctcccaggttcaagtgattctcctgtctcagcctcccaagtagctgggattacaggtacctgccaccatgcccagctaatttttgtatttttttttttttttgagatggagtcttgctctgttgcccaggctggagtgtagtggcaagatctcagctcactgcaacctccacctcccaggttcaagtgattcccctgcctcagtctccctagtagctgggactacaggcgtgtgccaccacacctggctaatttttttttgtattttagtagagacggggtttcaccatgttggccaggatggtctcgatctcctgacctcacggtctgcccgtcttggcctcccaaagtgttgggattataggcgtgagccaccgcgcccagcctaatttttgtatttttaatagagacagggtttcatcctattggtcaggctggtctcaaactcctgtcctcaggtgacccatccgccttggcctctcagggtgctggaattacaggtgtgagcgaccgcgcctggccaccatttaaaaatctataagctgttgctttttgctatttacctccttatttatttaatttgagacagagtttcactctgtcgcccaggctggattgcagtggcacaatctcggctcactgcaatctccacttcccaggttcaggtgattctcgtgccttagcctcctgaggagctgggattatgggcatgctccaacatgcctagctaatttttgtatttttagtagagacgggttttcactatgttgaccaggttagtctcgaacttctggccttaagtgatccacctgcctcggcctcccaaaatgttgggataataccacacctggccctacttccttatttataactaataaatttttactgttttttgatttactaactttacatattttctattgagcactacctattatggaagatgaaggtttagcactcgtagaccaccaatcctgctgctgcttctggaatcttctcagtagagttaactcacaatttttggttaaatatttagtatttatatcatagtgattatataaatgttgattactgttgaatttagtcgtatactatgattacatgacctttcttgaataacttgtttttcccaaagtttgtagtctatacgaaattatttactttattctccatataactattattcattgcttccaaattctcctacagtattgtaacattccacagaataaggttagacgcatcaagtgaaccgtcagttctatgctttcttctcctggttgatccgggagctgttttgactcttgtcccagcctgctgcatggctgtgattctctataccactgccctgtgttggatcccctgtttcttgaatttcttcctttttcttggcttgttccctcatgtggaaggagtacatcttgtagcttccttgtaggttcctgggaggtcttttgaatcttggcaaatcagaaaatgtttttattctactttcaaacttaattggtagcttgaaaagctatagatttctagttaaattaattcctcttggccaggctcagtagctcatgcttgtaatgtcagcactgtggttgaagccaaggcagaaagagttcgagaccagcctgggcaacacagtgagaccccatctttaccaaataacagaatattagctgggctttggtggcatgtacctgtagttccagctacttaggaggctgaggcaatgaggctcccttgagcccaggagtttgaggttacaatgagctataatcacgccactgtactccagcattgtactcagcaacagagtgaggccctgtttcttaaaaaaaaaaaaaaaaaaaaaaattttaatgctggtactagctatgaataaatccataatattttttgccagttttaaaatcttataaatgaaagcataccatatctattaggtagcttgcttttttttttaaacattttatatttttgagatgtatccatttagctctgtttcattcattttcactagtgtattatgtccccatataattttgatagcttaaaatactattgtaagttaggaatttatatatttcagagaatttctttctttctttttttttttttttttttgagacagtcttgctcttgtcgcccaggctggagtgcaatggtgtgatcttggctcactgcaacctctgcctcctgggttcaagtgattctcctgtctcagcctccctagtagctgggattacaggcatgcaccaccatgccagactaattttgtattttgagtagatcgcctcaggtgatctgcccgccttggcctcccaaagtgctgggattacaggcgtgagccacagcgcccggccttcaggatatttcttttatagcattttctaattgggcttaacaagccctactttaagaaattaaaccttatgattagctgtcttaatatagaggcttaattgaagctgaattatgattcagttgaagttgaattgagttattggggcccctgtccccttgcaggaaggatgaaagtagtggctagcctcagctttaggggcaggcgatgaggagccagatcagtatttctatctcagattcagaagacccagctgtccatgtgcatcatcggggaagcatcttgctctcagaataagcagctcaatccagctcccaaattctgaccgtggcttcagtgcctttgtggaatgagaagggacatgaggaagaaagtgagtcactaatacacattctcacctgacctgagccgcctttggtccctgaggccatgtagtttcctttcattgtgatggtaattttaaaatagtataatgtattatttatcttatcaccattttattattcaatgggagaacttttctgaacaaatcaagataaaacatgatctaaatctatgttaagtgtgatttaagggagacagtgattcatatttgtaactagttttcttcccttagtgactgagaacaaccaatactgacttttgaagagcctcgtggatactaattatttattcactcccttgttccttcaacatactgtttagggaattttttacatgctagtctagacagtgggcatagacagatgaatgagataattcctgtcgtaaaaatgtgcatggtttaggggaagaggcatatcaactaaaactgcatatgtgccctacagcagaatgacagaaacattaaatgtgattcctttgtaattgggatctctttcacttgaagttggtaattcaggtttgtccctatgacccccataagtagaagtagcacatggtaattacttgagctatgttcccttccttgtacattcaagccatccagatttctgtatttctttgtcaccattgttttggttgtaaaacagcttcattttcagactaattataagttaccattattatgattttgctttgagacattttcttgggtagagctatgcccatcctaagatacatggtacaagtacaatatagatttggatttttgtgtttgtattggctaagacaggtgttagctccatatttctttttttttttttttgagatggagtcttgctctgtcgccaggctggagtgcagtggcgcgatcttggcccactgcaacttctgcctcctgggttcatgtgattctcttgcctcagcctcttgagtagctgggactacgggtgcgtgccaccacgcccagctaagttttgtatttttagtagagacggggtttcaccgtgttggccaggatggtctcaatctcttgacctcatgatctgcctgcctcagcctcccaaagtgttgggattacaggcgtgagtcaccatgcctggcctagccccatatttcttgtaactttgtatctgatgtctaatatatttataaatacagaaatgtgtgattttctttagtaagtttatagtttttttataggtagacaaagcatgatgacttttgaacaagtttaaagtttttatttttattttttataggttgtcttttggaaatgcaggtttaaggacaaattatctgcttaagctagaagatgggatcgaatagcagcagaatcggcgatcttcctaaaaatgagtacttgaaaaagttatcaggcacggaatctatctctgagaatgacccgttctggaatcagcttctctcattttctttccctgcaccaactagcaggtaagagattgcctggagattgaaaatttgaatagagggccatatcaacttgtgtggtatgctgattaaaaaaaaatttagaaatgttctgtctatctatctagtctatctgtcatacatagatcagtagaaaatccaaaagatttgaaagtagaaaataagcttttctttttacccaactcagtagccacctcccttctctagaggttatcactggtagcagtttattttgaatcgttctagagataatataggttacttaagcatatatcccatatagtttcacaaaattgtttaaatacaaatggtagcatactacacgtactgttctgtcccttgcctttttttccacagttaagtaaaatatatcttgtatatgtagcacatttgcaacttccttattctttttaatggctgtggagtatctgtagaatatatttaattggtttttctgttgatgaacatttagattgtttccagtctttgttgtaacagttactgccgcatacatcatttttcatacacacaatatatctttagtataaattccttgaagtagaattgctgggtcaaagtgtatgtgcatttgcaatttggtagctatgccaaattgtgcaccatggaagttgtagcaatttgcatacctaccagcaatgcatgagaggtgtgtttccccatatctttgtcagtttgatgcattttagacctttgacctctgccagtttcagaggtgaaaaataatatctcatatttaattctattacaaaaactgtcagacaataataatgaagaatgaatagaatattgaattcccatacactcaataactagatttaaaaattttttatttactttttaagagctttattatgataggcagaatagtagccccccaaagatgtccatgtccttgtctgcagaatctgaatatgttacattacatggcaaaggggaattaaagtagcaaaaggcattaaggttactaatcagctgaccttaaaacagggagattatcttggattatctgggcaggcccaaagtaatcacaaggcttcttgaaagtggaagagggaggtagaagagaaagtcagatgtgatgtgaggaggactcagcctgcccttgctggctttgaagatggtagggaggtcatgagcaagaaatatgagcagcttctagaagctggcagaggcaaggatgcagatttccctctagagcctttggaaagggatgcagccttattgacatcctgatcttagctcattgagtgtcagacttctgacctacagaactgtaagataataaatttatgttgttcacaccactaaattttgataacttttgtagtagcaatagaaaaataatacactttttgagatatgtttcatatatcatgtaattcacccatttaaagtgtattattcagtgtttttattcacagaattgtgtaacaatcaccaattttagaacattatcatcccagaaaggaaccatcccatgccctatcccatgcccattagcagacactcccccaaactctagattgcactagcaaccacttatttatttatttattttttgagagggagtctcagtctgctagagttcagtggcgcgatctctgctcactgcaaactctgcctcctggattcaagcaattcttcggcctcagcctcccgagtaactgggcttaacggttgcatgccttcatgcatggctaatttttgtattttttgtggagatgagatgtcaccatgttggccaggctggtctcgaacccctgacctcaagtgattcaccttcctcagcctcccaaagtgctgggattacaggcgtgagacactgcgtccagccactaatttaataactactactaactttgcctcttctagacgtttcatgtaaatgaaattgtaacaataggtggtcttttgtgactggcttctttctttttttttcttctacctttttagagatggggtcttgctctgttacccaggctggtcttgaactcctgggctcaagaaatcctcagcaccccaaagtgctgggattacaagtgtgagccactgcgccccgccgtgactggcttctttcactgaatgtaatattcatacatgttgtagcatgcaccaatacttgcattcctttttttcttttttttttgagacaaggtctcactctgttgcccaggctggattgcagtggtgcgatcgtagctcactatagccttgaactcctgggctcaagtgatccttccacttcaccttcctgagtagctgggaccacaggcatgcaccgccatgcctggctgctttttaaaaaatcttttgtagacataaggtcttgccatgttgcccaggctggtcttgaacgaacacctggcctcaagtgatcctcctgcctctgcctctgaaactgttgggatttataagcatgagccactggacccagcctccattcctttttattgctgagtgatactccattgtatggatatactgcattttgtttgtccattcagaaattaatagacatttggatattgttgagtgatactccattgtatggatatagtacattttgttcattcagaaattaatagacactgggttgtttctatattttgttcattattgttttttaagtatcgtaaagtctttttttttacataaccataataccattatcacacctcacaaaattaacaataatttctgctacccagttcatatttaaatttttccatatttaaattttaattaaatttaaattaaagttgttttaatagtttattacaattaggagccaaataaggtgcatacgttgcacttgatggttcttgtccttaaatgtcttctaatgtagaatataggtgtccacttcccacccttgccactattttttcccttcatgtcatttttaaaacaaattgtgtcagtttttctgtagaatgttccatcttctgtatttatctgattgcttctcacaccttgtaacttgttcttttattccatatatttcccgtaaattggaaatgaggtttaaaagcttgataaaatttaggttaatcatttttggtaaggtattccatatgtagaaaaagtatgttttataccagttatcatgctaagattgatcagagttttgagtgtattttagcatgtattgatttttgcctgaatcacctgttttataagaggttacaaaatggtaatatttctaatttggtcatttctacatttaataactggagttcttctgtaaagaggactttatgtcatcaattaggttatgtaaaatatagttcttactatatttattactaattaaaggtaagcacttcagtttttttctttaccaattttcaggaaggggttggtgtaatcatgacaaagaagtctatacttcccgtttccctttacctcagaggtagagggcctatttctgtcttgagggtaaattcacacacacacacacacacacacacatgttttccagtgtgactaatagcagtcgtttttctttttgatacccagttcagcaagttttggatagtggtccttatggttttatttgcctttctttaataattaaggttgtgtttattttcatatgtttaaggggtattggtatttccttttccgtgaactgtttatatcttttggcaataaattttaatttttttattattattttttattatactttaagttctagggtacacgtgcacaacatgcaggtttgttacatatgtatacgtgtgccatgttgatgtgctgcacccattaactcgtcatttacattaggtatatctcctaatgctatccctcccccctccccccaccccacaacaggccccagtgtgtgatgttccccaccctgtgtccaagtgttttcattgttcaattcccacctatgagtgagagcatgtggtgtttggttttctgtccttgcgatggtttgctcaaaatgttggtttccagcttcatccatgttcctacagaggacgtgaactcatcctcttttatggctacatagtattccctgctgtatatgtgccacattttcttaatccagtctatcatcgatggacatttaggttggttccaagtctttgctattgtgaatagtgccacaataaacatatgtgtgcatgtgtcttgatagcagcatgctttacaatcctgtgggtatatacccagtaatgggatttctgggtcaaatggtatttctagttctagatccctgaggaatcgccacactgacttccacaatggttgaactagtttacagtcccaccaacagtgtaaaagtgttcctatttctccacatcctctccagcacctgttgtttcctgactttttaatgatcgccattctaactggtgtgagatggtatttcattgtggttttgatttgcatttctctgatggccagtgatgatgagcattttttcatgtgtcttttggctgcataaatgtcttcttttgagaagtatctgttcataccctttgcctactttttgatgggggttgtttgattttttcttgtaaatttgtttaagttctttgtagattgtggatattagccctttgtcagatgggtagattgcaaaaattttctcccattctgtaggttgcctgttcactctgatggtagtttcttttgctgtgcagaagctctttagttgaattagatcccatttgtcaattttggcttttgttgccattgcttttggtgttttagacatgaagtccttgcccatgcctgtgtcctgaatggtattgcctaggttttcttctagggtttttatcgttttaggtctaacatgtcagtctttaatccatcttgaattaatttttgtatgaggtgtgaggaagggatccagtttcagctttctacatatggctagccagttttcccagcaccatttattaaatagggaatcctttccccattgcttgtttttgtcaggtttgtcaaagatcagatggttgcagatgtgtggtattatttctgagggctctgttctgttccattgatctatatctctgttttggtaccagtaccatgctgttttggttactgtagccttgtagtatagtttgaagtcaggtagtgtgatgcctgcagctttgttcttttgccttaggattgacttggcaatgcgggctcttttttgattctacatgaactttaaagtagttttttccaattctgtaaagaaagtcatcggtagcttgatggggatggcattgaatctacaaattaccttgggcagtatggccattttcacgatattgattcttcctatccatgagcatggaatgttcttccatttgtttgtgtcctcttttatttcgttgagcagtggtttgtaattctccttgaagaggtctttcacatcccttgtaagttggattcctaggtattttattctctttgaagcaattgtgaatgggagttcactcatgatttggctctctgtttgtctgttattggtgtataagaatgcttgtgatttttatacattgattttgtatcctgagactttgctgaagttgcttatcagcttaaggagattttggactgagttgatggagttttctaaatatacaatcacatcatctgcagagataatttgacttcctcttttcctaattgaatatcctttatttctttcttctgcttgattgccctggccagaacttccaacactatgttgaacaggagtggtgagagaaggcatccctgtcctgtgccagttttcaaagggaatgcttccagtttttgccagtcagtacaatattggtggagggtttgtcataaatagctcttactattttgagatatgtcccatcaacaccgaatttattgagagtttttagcatgaagggctgttgaattttgtcaaaggccttttctgcatctattgagataattatgtggtttttgtccttggttctgtgtatatgatggattacggttattgatttgcatatgttgaaccagccttgcatcccagggatgaagcccacttgatcatggtggataagctttttgatgtgctgctggattcagtttgccagtattttattgaggatttttgcatcgatgttcatcagggatattggtctaaaattgtcgtttttggttgtgtctctgccaggctttggtatcaggatgaagctggcctcataaaatgagttagggaggattccctctttttctattgattggaatagtttcagaaggaatggtaccagctcctctttgtacctctggtagaattcggctgtgaatccatctggtcctggactttttttggtttataggctattaattattgcctcaatttcagagcctgttattggtatattcagggattcaacttcttcctggtttagtcttgggagggtgtatgtgtccaggaatttatccatttcttctagattttctagtttatttgcatagaggtgtttatagtattctctgatggtagtttgtatttctgtgggatcagtagtgatatcccctttatcattttttattgcgtctatttgattcttctctcttttcttctttattagtcttgctagtggtctatcaattttgttgatcttttcaaaaaaaccagctcctggattcactgatttttttgaagggttttttgtgtctctatctccttcagttctgctccgatcttagttatttcttgccttctgccagcttttgaaagtgtttgctcttgcttctctagttcttttaattgtgacattaggttgtcaattttagatctttcctgctttctcttatgggcatttagtgctataaatttccctctacacactgctttaaatgtgtcccagagattctggtatgttgtgtctttgttctcgttggtttcaaagaacatctttatttctgccttccttttgttatgtacccagtagtcattcaggagcaggttgttcagtttccatgtagttgagcggttttgagtgagtttcttaatcctgagttctagtttggttgcactgtggtctgagagacagtttgttataatttctgttcttttacatttgctgaggagtgctttacttccaactatgtgatcaattttggaataagtgctatgtggtgctgaaaagaatgtatattctgttgatttggggtggagagttctgtagatgtctattaggtccacttggtgcagagctgagttcaattcctggatatccttgttaactttctgtcttgatctgtctaatgttgacagtggggtgtgaaagtctcccattattattgtgtgggagtctaagtctctttgtaggtctctaaggacttgctttatgaatctgggtgctcctgtattgggtgcatatatatttaggatagttagcttttcttgttgaattgatccctttaccattatgtaatggccttctttgtctcttttgatctttgttagtttaaagtctgttttatcagagactaggattgcaacccctgcttttttttgttttccgtttgcttgttatatcttcctccatccctttattttgagcctatttgtgtctctgcacgtgagatgggtttcctgaatacagcacactgatgggtcttgactgtttatccaatttgccagtctgtgtcttttaattggagcatttagcccatttacatttaaggttaatattgttatgtgtgaatttgatcctgtcattatgatgttagctggttattttgccctttagttgatgcagtttcttcctagcctcgatggtctttacaatttggcatgtttttgtattttatttctccttcacttatgaagcttagtttgtctggatatgaaattctgggttgaaaattattttctttaagaatgttgactattgtcccccactctcttctggcttgtagagtttctgccgagagatccgctgttagtctgatgggcttccctttgtgggtaacccaacctttctctctggctgcccttaacattttttccttcatttcaacttggttgaatctgacaattatgtgtcttggagttgcttttcttgaggagtatctttgtggtgttctctgtatttcctgaatttgaatgttggcctgccttactaggttggggaagttctcctggataatatcctgcagagtgttttccaacttggttccattctccccgtcactttcaggtacaccaatcagacatagatttggtcttttcacatagccccatatttcttggaggctttgttcatttctttttattctttcttctctaaacttctcttcttgcttcatttcattcatttgatcttcaatcactgataccctttctttcagttgattgaatcggctactgaagcttgtgcatgtgtcccgtagttcttgtgccatggttttcagctccataaggtcatttaagggcttctctatgcggtttattctagttagccattcatctaatctttcttcaaggtttttagcttcttcgcgatggtttcgaacatcctcctttagctcggagaagtttgttattaccgatcttctgaagccttcttctctccactcgtcaaagtcattctccgtccagctttgttctgttgctggcgaggagctgcgttcctttggaggagaagaggcactctgatttttagaattttcagcttttctgctctggtttcttcccatctttgtggttttatctatctttggtctttgatgatagtgacgtacagatggggtttggtgtggatgtcctttctgtttgttagttttccttctaacagtcaggaccctcagctgcaggtctgttggagtttgctggaggtccactccagacgctgtttgcctgggtatcaccagtggaggctgcagaaccgtaaatattgcagaacagcaaatgttgctgcctgattgttcctctggaagcttcgtctcagaggggcacctggccgtatgaggtgtcagtcggcccctactgggaggtgcctcccagttaggctactcaggggtcagggacccacttgaggaggcagtctgtccattctcagatctctaactccgtgctgggagaaccactactctcttcaaagctgtcagacatggacatttaagtctgcagaactttctgctgccttttgttcagctgtgccctgcccccattggtggagtctacagaggcaggcagttctccttgagctgcggtttgggcttcccggctgctttgtttaggtactcaagcctcagcaatggcaggtgcccctcccccagcctcgctgccaccttgtagtttgatctcagactgctgtgctagcagtgagcaaggctccgtgggtgtgggaccctccgagccaggcgtgggatataatctcctgatgtgccgtttgctaagattgttggaaaagggcagtattagggtgggagtgacctgattttccaggtgctgtctgtcacggcttcccttggctaggaaagggaattccttgcacttccctggtgaggtgatgccttgccctgcttcggttcacggtccacaggctgcacccactgtcctgcacccactgtctgacaagccccagtgagatgaaccaggtacctcagttggaaatgcagaaatcacccgtcttctgtgttgctcatgctgggagctgtagactggagttgtttctattcagccatcttggaacctccccccaaattttaatttttaactttattgtatacaattggattgggccttagaagtttaccttagtttaagccaggtgtggtggctcttgcctgtaatccaaacaccttgggagaccgaggcaggtggatcacctgaattcagcagttcaagaccagcctggtcaacgtggtgaaaccctatctctactaaaaatacaaaaaattagccaggcgtggtggcgggcgcctgtaatcccagctactcgggaggctgaagcaggagagtcacttgaacccgcgcggcagagcttgtggggagctgagatcgcgccattgcactccagcctgggcgacaagagcaagactccatctcaaaaaaaaaaaaaaaaaacgaattttaacttagtttataattaatctgatggcttggattagatgtattttatattgaagtggttacttattcttgcttctgagatccttggaaaattaaaggtggctgtggattggtgagaaaggtcatactggggatgagctatagcatcaacaacttttgaaatcatttccttaatccttgcagaattatcactgagtactgctgctcatgtgatagtgatacgacttagaggaaaagagggcgaaatggagagcatgatttattgtccaaaataatttttcttttcacttatgtaaattctaaagtaatttataaagctattccaaattatagtatatggtttttacattgaaatatactaaagtagacttaactaaatagagatatgtaccatgtttaaggaataaggagactattgtaaaaatgtcacttcttttcaaattgacctatagattgaagacaatttgaattaaaattctgaaagccttgttttggaagattgggggatcttgataagtttattctgaaatgtgtatgaaaaagtataatgaacaagaataactaaaatacttaagaataagaataaatgtatgtgtatgtacttgatttatgtggagctggcatttcagtggggaaaaagatgaacttcttaaaaaatagtgacgggaataatttgttagccatttttgtcgacctgtgccagtgcctcacagtttaagttattatggctttatagtttgttttgttaattattatttttactcaaattttattttattttattttatttttttaatttttgagacagagtcttgctctgtcgcccaggctggagtgcagtggtgcaatctcagctcactgcgacctccgcctcccaggttcaagcaattccctgcctcaggcttccgagtagctgggattacaggtgcctgccatcacgcctggctaatttttgtagtttagtagaggtggagtttcatcatcttggccaggctggtcttgaactcctgacctcctgatccacctgccttgacctcccaaagtgctggtattacaggcgtgagccactgcgcctggccaccattctcttttcttaaatcacccaggtgatttaagagaaacgtataaagggatcttagaaagtgaaaaaactgtaaagtaaataaactgcattgtaaatctgtgagagtatatttataaaggtttcttcccacccccaccgccacaagtgagtttacatgatagaggtttcatttgtggtgttgcatatacttttggtctgtcactttctctttggcactgccctgctcctcactgatggtatttgatatttgaccttgggactgagtaggctttgaggtagcaggtgcccccttgttgacagagtcaggggccaaaattacctagttcatgaattattcagggctaagatgaatctcagtagaggagactctgaatctagataattctgagattgttcactcttggaattcgttagatacatatgtgccgtcttcaagtaaagtccatttttgtagccaaaaatcgatgtttgctgcaatttttagaaatactaataaggcctttaggacgaatctaatccttccttactattaactgtttttagcatcagagtaatcagattttgtaagagtttccaggtgtggttctaaaatctttcttaaattatttaatagtttttattttttcaccctgttaaaattagttgtgcagcaaagatctgaaacaaaatgaagaataattaaagactaaaggttaataatatacactgtttttttcctaaatattttaaactacttatatgactgattttatacatgtttctaaactacataatagcaacaaaaatgaaaaacagacctgtacttattattttttggttcataggcatctgaggctatggtgtgtgtgaacataatcgtgtgtcatgcttatcattgagaactgctggaccagatgacttatctctgagtatcaaactgttattcatttatttgtttctcaggctataatagttagctggatatatgatgtctcttgttcttaaaggcttataatcttttttttttttttttttttcagacagagtttcactcttgttgcccaggctggagtgcaatggcatgatctcggctcaccacaacctctgcctcccgggattaagtgattctcctgcctcagcctccccagtagctgggattacaggcatgtgccaccatgcccggttaattttgtatttttggtagagatggggtttctccatgttggtcaggctggtcttgaactctcgacctcaggtgattcgcttgcctcggcctcccaaagtgctgagattacacgcccagccagagcttataatcttatctgtaaatcagcaaacaagtatggtgaaatatgataaagggtgttatagaagaattgcattttatgcatatgcaaacaaatatgcacatatatcccttctctttttttgataaataatagcatgtatattatacacactttttcactttgtgctttttttcatcagttatatcttgaagagccttctatatattaacttcctcactctttttaatgggggggcatatataccaaaattaattggatttaccatttgggttttaccatttggattgcttccagtgttttgttattacatataatgtagcagtgaatagccttatacaagctgggaacggtggttcatccctgtattcccagcattttgagaggctgaggcaggaggatcttttgagactaagagtttgagaccagcctgggcaacatggcgagacccccatctctacaaaaaataaaaaaattagctgagctcggtggcttatgcttgtagtcccaactacttgggaggctgagtcaggaggattccttgagcccaggagttcaaggttgtagtgactatggtcaggccaatgctttcgccagcctgggcaacagaacaagaccctgtctcaaacaacaccaccaccaacaccaccgctaccaccttatacatatgggtagaagtgacttcttgtactataaaggaaacgtggccagatgacttctagtaatgcttccagtttgtgttgagaggaatgggaatcaagtgtaataggttgggaatgtagaaattgcttcccaacatagttcatgatgcttcagggtaaattgataaggctgcttgggtctagagtggtctggggctctgaagggtgtaggggctctaactatgaaaggctgaactgggaaataaaaatatgtccacctgttacctatttttggcacacttgttagaaagctgaggattagaagtagggtcccttgtaggctcttgttgagtggatttggagaaaacattgtttcagagacattatttttttaagtagggtgagtaggtggaaagtgcaggaagaaaaactagggcaggaaaacaaaatctgagacatctgcagcaatatacctgtgatgtgctgaaggtctgaatttctattactgtgtaggaaatggaaagtcctacatctcagtaagtgtgtgtaaccagctaacagcagtatagagaataatatctttaaaaagttcttttgttttaaattaacacctgatttgagtgttaatacttaatgagcttagagttccagatttgagagcagctctgagcagtatagcagcagcctgaatactcttctccagaggaattgttttgctaaaaggtgcagtgactttgggtgaagtgtgaagaatggagaccatgtagcatggcagggggaacatggattttggagccaaactgaccttgcctgagctccacaactgactagtttgtgaattcaggaaagctgcttaatctcactgaacctgttgttgcttttgtaaaatggaaataataacccctaccatgtagattcatagggatgatgaaacactatcatgcatgtaaagtgtctgactttgctcttctttcaaggagtaattacctattagtttacaaagacctaggactctgtcttgagagttagtctaaaatatttgaggaatgaaaataagcagcagaaatttaaccaattttctgatgaccgctttatcttgatgattgaaagtcctgtgcctcttttgaactaattgttctgctgttttaaaaattaagccagacagtgattatagtaatagtcatctttgtgtataagcaatctaccttttttttttttttttgagtcagagtttcgctcttgttgcccaggctggagtacagtggcacgaccttggctcactgcagcctctgcctcccaggttcaagtgattctcctgcctcaccctcccaagtagctgggattacaggcacatgccaccatgcctggctagttttatatttttagtagagacagggtttcaccatgttggtcaggctggtctcgaactcctggcctcaagcaatccacccacatcagcctccaaaagtgctgggattacaggcatgagccaccatgcccagccacaccctactttttataaaggctacttttcagaaaactttactgtgttacagaaattgtattatgtgtactgagcactagatggtgctcatataaggcaaaaagggcagctcttggcacagtcacttaaaactaatttttctaagtaccaaagtaatgcatgttcatttttaatactttaaatacagaaaagcaccaggaaggcaaaaaaaaaaaaagataaaaataataacaaccaagagtaacttgttaacattatggtgtatatcgttttaattctctctcatttttaaaatttttttaattttttttttttttttttttttgagagacccagtctcactctgtctcccaaactgtagtgcagtggtgtgatctcagcttactgcaacctccacctcctgggttcaagcaattcttctgcctcaggctcctgagtagctgggactacaggtgtgtgccatgctcggctaatttttgtatttttggtagagacagggttttgccatgttggcctggctggtctcaaactcctgacctcaggttgaagcaggagaatcgcttgagccctggaaacagaggtttcagtgagctgaggtcatgccactgtactccagcctgggagacagaaagaaactccacatcaaaaaaaaaggaagtatttttttgattaatatacctaaaaaaatagttatggaatgtcttctagttgctagggactgtttttaaggactaaaaacatgagtgacaaagtccctgctctcatgcagtttatatgttactagaggagatgagcgataaacaagtgaacaaataaatatgttaagtcatttctggaagtgtcaagtgtaaggaagaaaagcgaagcggagtgaggtgatggagagcaatagctttaggagatttctttagccagagagtctctgggaaagcagcatttgagcagagacattatgatgccagggagtgagccatgcatgttttgtggagagtattccaggtagaggggcagcgagtgtaaagaggctgaagtggaagtaagttctgcttgttagaagagcagcaaaaggcccgtgtagcagaacagccaacacgaaacaaataacataaggacttggctgtgtgaaagatcttataagttgtatggtattccagagatgagcctgtttcattatcactatttgggaattgagtctagtctgctataatttactaactatcctataatatggaaagattttattcatgttttttttattgtggtaaaataaacataaaatttaccttttcaaccattttttaaattattgttttttcgtctggtcctcttgactcttgtaaccttttcaaccatttttaattgtacagtttaaagtacattcacagggttgtgcaaccatccccaccatccctttccagaatattttcatcacctcagatagaaatgctatacctattaaacaataacttcccatcctctccctccagtttctggtcacctctatttttactttctgtctctatgaatttgactactctgggtatgtcatataagtggaatcatacaatatttgtctttttgtgactggcttatttcatgtagcataatgctttctttctttctttctttcttttttgagacagagtctctctctgttgtccaggctggagtgcagtggcgtgattttggctcaatgtaacctccgcctcctgggttcaagttgtcctcccgcctcagcctcccaagtagttgggattacaagtgtgcaccaccatgcccgctaatttttgtattttttagtggagacggggtttcaccatgttggccaggctagtcttgaactcctgacctcaagtgatctgcctgccttggcctcccaaagtgctgggattataggcttgagccactgtgcctggcctagtataatgccttcaaagttcataatccatgatgtaatttccttccttaagtctgactaattacccattgtagttatataccacatcatataatgttttctaaacttcagtttgctgtactcttatccttttaaagggcttccatttctctttagcattgttagtttccacttgtcactttgacttttctttcagggatttttcttacatgataaaaaatttaattctactgagataaatgataaaatagaatgataaaatgatataatgataatataattctgctaaaaggattcgctaacgtaagcatcattgttactttaccagttatttattgagctcactgtttgtcagatgctggacccattgctgtagacacctccatttttttagttctgttattgttattcaagtctattattcccacgtgtgagagaactgaggcctaggaaggttgtctaaagccacacagtgagtagcgagtaaggaccagatttaatttaaaccaggtttatttgtctaagtccagagaggaattccgttgaccatcatgccacactgtctccttgggaagcacaggctaatctgagacccagtttcatgtaagtactaaagagctgcagcattaaatcgtatggtaatctttgagagtagaaccaccagattatatgttcacattttcaagcatttttcaaagctgcagatcataatcagaggaatcttgagtgccatcatttacagtgatcacacaagctgatgggtaatctgtttagtattttcaccttgccttgagtagagtgtatcttctctctttttaagcagagctgcctgaatgatcctttgtcaaagtttcttagtctgtttcctcagttgacacacaggaagagagacttttgtttaattaggtcacgtttttaactgacagaagcaagtgattgtaaaattactttcttctttgaatctttgatgcctgtctctgtttctatatttttaggctctttggcacactttatgttcaattttattagaacttttcaagttgaaaaatctgctctgttgtagaggtgggcctgggatcgctgctaaaccatcttctaaattctgttttaactttttctttgtaggtttgcttggttggtgaccaaaataatgtactaggctgttttactcagggaataaataatttgagacttttcttggcatcttattatatttttcaaattgagggaccacaagaagttcagtttttacatcttgagtcaaaacctttatttcccattctttcatttatacctttctatgcaaaaatcattttagaagatgcttaagttttcccaggattaatcagtcccttaaactaaaagcttaaatgggggaaatatatcctttaaagcattaaagtaaagggacatgtaagttttactgcaggtgcacccttgattcctcttctttctcactgtgttggttggaattttttttttttttttttttaagtcaatgtttttctctttcttgggaaaataaacaccgtattatctagcatagtagttgctgacattttgacattttaatagttatatttcctttcattttggcagttgaatgacagcatatacgattgtctgtgaatcacatgaatgtaaacacctttttggttctgcatgggtgcgttaaaaattgctataatttatatgcagtttttgtcctttgactttttcctattaataggtcctcttaaaacattaaccttcccacagtttaaccactgaattggctgattcttgttagttttgtgaatgatttctgtaattctctttgctaaggtaagggggaaaatgtcttcagaagtgcttctgtcctttcctgaatcgttacttgttgattttttcaggttatatctttgactaacattatatatttatcagaatttgtatgttgttggctgaaattgacatcattaatataaaatgtcagttttgaaagaattttatggcggaactttcagctgaagggactaaggattttcagtgtttatgttatgaaacttacagtttgattgttcagcaaacctgtgttcagaggtctgttataacttctcccccaacaatttttttgcctatctgcttttcttaaaaatatttgagctattaatttctcacttttcattattgagattcatatatgagaacggtgtgcctaaaagtaaaataaaaccagtctaaattacagaaaactgtgaagtagggaatacttaatttaaaattttagcttcccgaccacactatagtttatgatttcatagcagttacaagaaagtcgtctatcatcttaccattttccttattagatttaaaattttgttttcttccaattctttataattcacataatttttgcatgattggaattataatgtagatatactttttataataatttatgtgtgacacaacttcttttaggaatatatagaaattccaactagttgctggagtgtttctaggttgatattatgtgggtttgccttaagagtatctcatttaatattattcatattgaaagagtattaatctggaagttaaatatgtttattcttataccgtgacattggacaagttactctgcttctctatttctgtcacttgtaaagtgaggatactcccatttcctcggtcaacttctcagggtttttaaaagaaatcaaatgaaataataaaggtgaaagaactttgaatagtgtatataggcctgtacaaaatgcaagttatttcagcaaatttatttgcatatggacaataatatgctaacatctttaaacacatttcttttgtagaaggttaaataatactttttctaaatcccctctcccttgtcaaaatgatttctttaaagtataacacaaaagtcagtttcaactcaatttgtttaattttaattttaattttaatttttttgagacagggttttgctgtattggccaggctggagggcagctcattgcagcctccacctccagggctcaaggagcagctgggactacaggcactctaccatgcccagctaattttttttttttttttggtagagaaaaggtctcactatgttgtccaggcttcaactcaattttagacaaacagcccccaatcctgaattagtaaatttcagatcagtgaagtctgctaaatgtatataataagactttttttttttttgaggttgtggtgttattatacaaccaattggtaagcttttcttctaagagtatatattattcaacttcttatttttttttaaccttaatccctgaggaccaacaccatggcctggcagtgtccattggtacctcttataatacttaaaaatccagtgaccgggtactgtggcttatgcctgtaatcccagtactttgggggtcaaggcaggaggattgtttgaggccaggagttctagactagcctgggcaacataatgagactccattgctacaaaaaaaaatttgctgggcatggtggcacacacctgtagtcttggctactcgggaggctgaggtgggaggattgcttgagcccaggagttctaagcggcagtgagctgggatcatgacactgtaatccagccttgggaatgcatcgagaccctgtctctaaaacacacacacacaaaatccaaagtgttcagatgaagaagaaagagacagatgagttagtagaaaagcagattgagatgacaaaggaaaaaagtgttggatgatagaaaccactaaagaggcacaaatcgtttctttaggtactacgtataggctccacgacctaagtcacagaacatcagctgagttagcttaagtgtgctgcttctgttgaccccagttgtgagtatttcacttgcaaactgtagcctgcctgacctgctacaccaattgaccaacatattgtaaatacctcttgcatattttcatatgtgacaattatcaggactaggtatttagtttattagatggtccatgttatatatttatttttattgtggaaacttgaattcttgaactacaggcttcatatgaaagaggctttttttccctaccaacaaatattttttccttattaatttgccaggatgggaaaactaattgacatccaacagtggtactctgttgatgaatgaagggatacatgctttaacaccaagctctggtctttttattccatcattcatgagctgtggtggggtctcccctgagttgtggtggagagcagatctaccatcaaggccatggttgtttctcttccatcacctcctgaattgtggctgatgacatttggaagcattttctgcttaagcagcaatatagtcaatcatgtgtctttataatgaacaaatataatccagaattttttatttaatatttgctaagtttttttcttttttttcttttttttttttttttgagacagagtctcactctgtcacccagactagagtgcagtggtgcaatctcggctcactgcaacctccacctcccaggttcaagtgattctcctgcctcagcctcctgagtagctgggactacaagtgtgagccaccatgctcggctaatttttgtatttttagtagagacggggtttcgctatgttggcaggctggtcctgaactcctgacctcaggtgatccacctgcctcggcctcccagggtgctgggattgcaagtgtgaaccactgtgcccagcccacatttactgagtttttactttttctgtcacaactgaatatttctgtattttgttgactagaccattcttgaagtttaggccagagccgtttgttatgccagaggattctcacatgagtttaagtccatagaggttataaactctgtacaatatttatgtgccccgtccctcttgttatttaatacaacaattgattgcctgggacagctaaagaatttaggtcatgttgaatagggttccttctaaatttacatggcacggtaataatttgctacttagacatcataccctttatgggttcctctgtaggccattttagagggaaaacaatccatatttgtaataaagctttatgcttgcttactgtcatcacatacttatttgagtttaaagataactggatttggtgtcaaaagatcttgatttgcaactttgcaaatctagcaatgtgtggaagattataagccacaattatgcactactggtgggtaatctttctggaatataatttgcgacattcatcagaacagaagtgttcattgacctagcaattgcacttccagatttatgttaaggacataattggacaagttcagaaatatatgtggagagacatgtgtaaagacattcatagcaatgtttatggtagaaaattgctaacaacttaaatgtccaccagtaagatcggctacataaataaaaatggtgcatctgcacactggaacaacatatagccgttaaaaacaatcctatgtttttagatatggaaaaggacctacagcatattaagtagttaaagccagttataaaaccatgtgtataacataatattgttcatgcaaaattgtatatatattttaaaatgtatatgatatattcatttaaatttttaatatgtttgtatagctttttatggttcagtttttttttttttttttgagatgaggtcttgctatgttgcccaggctgttcttaaattcctggaatcaggcagtcctcccccttcagcctcttgagtagctggcactacaggcatgtgccactgcacctggctggttcagtttttaaaacttacttggaaataatttaaatggattagaggttgcaaaaatgtacagggtggttctttagctcccatagtttcttgtaactgtaacatcttgtataactacagtacagtatcaaaaataggaaactgacattggtacaatccccagagcttattgagatttcagctgtcagtgatacggtttggatattttgtcccctccaaatctcatgttgaaatgtgacctccaacgttggaggtagggcctggtgagaagtgtttgggtcatggtggcagatccctcatgaatggctagcgccatcccctgatgatgagtgaattcttgctcagtttgttcacacaagatctagttgtttaaaagagtgtggcatctctttcctttctctctcttgcttcttctcttgccttgtaacatgctggctcctccttcaccttctgcaatgattgtaagcttcctgaggccttaccagaagctgagcagttgctaacaccatgcttcttatacagcttgaagaaccatgaacaaattaaacctcttttctttataaattactcaggctccggtattcctttatagccatgcaaaatggactaacacagttatttatccgtgcattcatttatgtgtttatgtatagctctataccgttttatcatgtgagtagatttatgtaaccaaccatgatcaagatacagtgcttaccctttatagccacacccatcctctcctccccatccccatccctaattcctggcagccactaattagttttctatttctgtagttttatttcagcaatattatgtaaatggaattttacattacgtaacattttgagaagggctcttttctttcactcagcatagtgtcttgaaatccattgaagttgttatggatctcacttgttcattcctttttaattgctaagtagtgttctgtgttgtagatgtgccatagtttgtttagacagtcactcactgagggacatttggatcattaccactttttggctgtaatgaataaagttgctatgaaattcatgtacaagtttttgagtgaacataagttttcatttctttgagataaatgttcaagagtacaattgctgtgttgtatagttagtgcatatttagccttataggaaattgccaaatggctttccagagtggttttatcactttactttcccatcagcaatgtgtgagagagccagtttatctgcctcctcgctggcatttgatgttgtcactattttttatttttgcaattttgataggtgtttagtgttgcctcctggtgattttgggatggttcatttttacaataataaaaagtaatagccactttcttttttcttttcttttcttttttgagacagagtctcactctatcactcaggctagagtgcagtggcatgatctcggctctctgcaacctctgtctcccaggttcaagtaattcttgtgcctcaacctcctgagtagctgggattacaggtgtgagccaccagacctggctaatttttgtatttttagtagagacggggtttcaccactttggggccagactggtctcaaaatcctgcctcaggtgatctgcctgtctcagcctcccaaagtgttgggattacaggcgtgagccaccatgcacatccaaagtaatagccattttattttaaaaaataaaaataatggtcatcctagcctgagcaatcaggcaagagaaagaaataaaaggtactcaaataggaaaagaagaagtcaaaccatctctttttgctgacaatatgcttctagaaaatcctaaaaactcctccagaagattcctagagcagataaatgacttcagaaggatacaaaatcaatgtacaaaaatcagtagcatttctatacattgataatattcaagctgacaaccaaatcaagaatgcaaacccattaacaacagcctcacaaaaaagaaaatacctaggaatacatttgcccgaggaggtggaagatctctataaggagaacaataaaacactgctgaaagaaatcatagacaatacaaacaaatggaaaaacattccatattcatggatgggaagaattgacattgttaaaatggccatactgtccgaagcaatctacagatacaatactattcttatgaaactaccatgtcatttttcacagaattagaaaaaactgttcaaaaatatggaaccaaaaaaagagcttgaatagccaaaacaatcctaagcaaaaagaacaaagctggaggcatcacattatctgacctctaagtatactataaggctacagtaacaaaaccagcatgatattggcacaaaaacagaccaatggaacagaatagagaacccagaaataaagccatatacctacagctatctgatctttgtcaaagcggacaaaaatcataaggaaaagacttcctattcaataaatggttctggaatagctgaccatatgcagaataatgaaactggaccactacctttcaccatataaaaagtttaactgaagatggattaaagatttaaatgcaagaacacagagtgtaggaatcctacaagaaaacctaggaaacaccattctggacattggctgtgggaaagaatttgtgactaagttctgaaaaacaattgtaacaaaaacaaaaattgaccagtggaatctatttaaactaacgagcatctgcacagcaaaataaaaaatcaacagagtaaacagacaacctacagaatgggagaaaatatttgcaaactgcattcagcaaacatctaatatccagaatctataaggaattcaaacagttcaacaagcaaaaaccaaataaccccattaaaaaatgaggaaaaggcatgaatggacaattttcttttccttctttttctttctttttttttttttttttgagatggagtctcactctgtcacccaggctggagtgcaatggcgcaaccttggcgcactgcaacctctgcctcccaggttcaagcagttctcctgcttcagcctcccgagtagctgggattacaggtgcccaccaccatgcctggctaatttttgtatttttagtagaagtttcaccacattggtcaggctggtctcgaactcctgacctcgtgattcacctgccttggcctcccaaaatgctgggattacaggcgtgagccaccatgcccagccgtgaatggacagttttcaaagggagacatataagaagccaacaaacatgaaaaagtgctccacatcattaatcattagagaaacgcaaatcaaaactgcagtgatttgccatctcacaccagtcagaatggtgttattaaaaggtcaaaaaataacagatgctggtgaggctgcagagaaaagggagtgcttatacatcgttggtgggaatgtaaattagttcagccaccatggaaagcagtctggagatttctcaaagaacttaaaacaggattaccatttcacccagcaatcctattactgggtatatattcaaaagaaaataaataattctaccaaaaagacacatgcacttgtatatttatcacagcagtatttgcaatagcaaagacatcacatcaacctaggtgcccatcaacagtggattggaggctgggcatggtggctcacacctttaatcctagcactttgggaggcctaggcgggaggatcacttgaggtcaggagttcgagaccagcctggccaacatggtgaaaccccatttctactagaagtacaaaaattagccaggtgtggtggcatacacctgtaatcccagctactcaggaggctgaggcaggggaattgcttgaatccgggaggcggaggttgcagtgagccgagattgtgccattgcactccagcctgggtgacagaaagagactccatctcaaaacaaacaaacaaacaaaaaaaaaacagaaaaaacaacagtaaattggataaataaaatgtgctatatatatgccatagactattatgcagccataaaaggaatgaattcatatcctttgcaagcaacatggatgcagctagaggccgttatcctaaggaaattaacataggaacagaaaaccaaatactgcatgttcttacatacaggtggaaactaaacattgattacttatgtatataaaggagaacaatagacactgggtactactatggggggaagaaggagggggacaagggttaaaaaactgttgggtactttgctcattacctgagtgatggaatcattcatatcccaaatctcagcatcatgcaatatacccatgtaacaaacctgcacacgtacactctgaattcaaaataaaagttgaaatttaaaaaaaataaaaaacctagacttaaaaaagtctttgttctgccacttagtattttctttatcagtgtgaatatctcatctataatagaaatactacctgctattcctttttcacaagatggctgtatcaaatgaaatcatatattcaaaaccaccttgtaaactataaaacatcatacaaatgtaagttgcttaatactgagagatgtcctaggtgtgaacaaggatgttgattttctttgtcatctactaggtttatacttctattgtaatgaaacattaatgtaaataaaatcaaagcagatcacttacagttgtttaatagagctgctttggtactatttcaaaacgtataaccacttcaaaattactaaatgatgttttatactcccctcctgctcagtgcaggggaagataagggaaggctgataaattagtaatttaagtgtgtattaagggataaataaataaatatttgacagttcaatacttatgggttttcttgttggttttggggagttagggaactcatatttattgagctgtgtgctgggcactttccacacattgccatatcatcttcatagctgtcctatgagttggtggcatttttacctccattttacagatgagaactgcgattctcaaattaagtaatttggctaggtcataccagtagttaatgaagaagttggaacttaaatatgcagcttcaaaaatcgatcgctttccattataccaggggcatatctgcttttcagtaacaagcacaagattggaaatctatgtgagcagtgtgcaggagttttgctaattgatggcagtggttaaactgagaggtagagtgcacttggtgtatatgttttaaacatgatccgcctatgaatccagtgggtgcagagacgttccatattcttgctgttggaaatccttcctagtattttaatttggtctataattttagtggaattaaacaagaatttttaaagattatgtacctgattgtgttgtgatttagtaacagttagtggttcatcaaaatctgctagccagacacttggcagcagtggttaattatatagggattgttgtgagcacatggttagactttatcatatactctagtggagacctgattattgctgtcgttctcattatctttttcttcccccctaaaaatctcaggatggttgtagccagggtcagatatttaaccattatatgccctgaccatcttgctgctgctctaagagttttgttaatgtttgtgttttattttgtgcttaatgactccccattagatgtaggatggaatccaaactccttagcatgacataaggatactccattcttttgctctgatttaccttaccagtcttctctgcaacctacacttcatgtagagggtgtgaggttgaggttgatgacagttgtctccctagggagattctcttcatgaaatccaaggaagcaaacagaatatggcccagaagtggcaatggtaatgtttaagagcttcctctatagttgtgaacattttcttttttctttttttttttttttgagacagagtttcgctcttgttgcccaggctggagtgcagtggtgtcatctcggctcactgcaacctccaccttccgggttcaagtgattctcctgcctcagtctcccaagtagctgggattacaggtgcgcatcaccacactcagctaatttttgtatttttagtagagatggggttttgccacgttggccaggctggtcttgaactcctgatttcaggtgatccacccgcttcagcctcccagagtgctggtattacaggcatgagccacagcacccagcctagttgtgaaaattttcataaccacttccttactgaattatcttccgggtagcccaatgaagtttcttaaccgtgtttcagattttgtgtgtgtgtgcgtgtgtgtgagagagagagagagagaaaggttgattgattgattcttgggcatagttctccaatcccttagtaattgtttattgtgatgtcaccagcaaaactgacacaaagaaatgacagatgtttgagatgaggatgccccaattaccctgatttgatctttcacagtgtgtacatgtatcaaaataccacatgtatcccacaaatatttacaattattatgtatcagtaaaaaacaaaataaaactgagattccagttttgtgactcccatctgtttatgttgctgccaaagtgatagtgtggccatcctctgagaagaaggcttctaatatatggattgcttcagggagagtcacacctggtcattggatcagtatggttgttgagagtttagtttgtttagctactttgactaagagattactagttttaagtatttatccctaatttcccactattgacagttttcaaattgacctggaggtatggaatttatgtatgcattaaacttgaagtatactgtgtgatacttatttagtctgaattagtatgaatatttgacactgcctttttgcccccttttgtgtgtttttactgcccaaatctgccttcagaaacaacatttggtttctaattgtaatattcttggaaacactggcatatttttacagtaccattttacttttatttactgcaaatgatggtttgttagttgcctgctgccagcacatctgagctcatttgtttaactaaaacagcattgtgcatagatgcctgtaacaggcagcaacagttaccaaccaccccagttccttactacctcattatagctctaaatcaagcaaataggaaagcagattattcttaaaatgttccaagaagtttagaaaattgagggatggaaggatgaaaggaaaggaattctaatgtaacaaacaattggtgtgttgcttttggcaggggtgtgcctggctgatttcttctgtagaaataactaacacttcagagtgcagaaattgcaggcatcctgcaacaaacagagctctatgactcctttagttaataaataattaccaagtggtttttttctggctgagccactgtatcagacacagtgggggatgtataagtgaatgagatcttcctgttctcttggagcttataatgtgggctctgaagatgcttctgctctaaagtgttgattgttgaacgaggcagtggcagtggtgctgtttcagattgtggctgtgtgttgggggatccaggcctgggggacatagtcacagaatggcaggtgctggctggctcaccacagtggggagctttccagataattctgacaaatcagactgcttcaaaaggatatgctcttttatatttggaaagaaagaaatgtcttttagtctgggtgctatggctcacacctgtaatctcagcactttgggaggccaaggtgggtggatcacctgaggtcaggagttcaagaccagtctggccaacatggtgaaacgtcgtctctactaaaaattcaaaaattagccaggcgtggtggcaagtgcttgtaatcccagctacttgggaggctgaggcaggaggattgcttgagcctgggaggcagaggttgcagtgagccaagatcactcactgcactccagcctgggtgataaaggaagactccgtctcaaaaaaaaaaaaaaaaaaaaaaaaagaaaaataaaaataaatgtcttttaaaaaatattttaacagaaatttaaacttgagcggcagaccttgccttgagggctggagactgggaagtgtttcctaaggagccaggggaaataattctgtctcctggtaatgaaggtctgagtggtgtctgacagtgcctaactgcctgctctgtaccaggctggaatactgtgatgaacaaggagcccacaatctagtgggggccatagacaagcaactgggcaatcttactgctgcgtgctcagttttatgattgagagctgttgggtgttggggtggagaatggacttcttaccttgtcttaggtgagacctgatcaaagaaggcttcctggaaggagtgatgtccaaaccaacctcactaatatacgttggaattaatccccttttcaggctaatactgttgtaaaaataaaccagagccctgttttggtttttgtttatacccaaaacaaaaatggagagactgaacttggtattccagccgtctagaatacttttccagctttgtagtttgccattcccctgtgttgattaaccaccccttcccagggcatgccaggctctctgtgactgcgatgcctctgcatgcactattctctttgttctgcctgcctgatgtctcttggcccttcaggaagaatagttacttcctccaggatagcctctttgattccttctatggtacgttgagtgcacatcctgtgagctcacacacagggctggtttcataattcatacttcccctgtactgaactgtctgtctgctttttcattcctccatgtagcctggaggcagaggcagcatctttcacgaagcctagcatgtcctaggcacccaagcactatttgctgatgaacaaatttagcagcttcgaagattacagccatatgtgtataattgaaactcttggttccagtcagctttaaaagagagtgccattgactgaagaaagtgaaatagattttatgcatgtggtctagttattaatttcataaagctttttacaatcctttgcattttatacctcttttactttttgtctgagtaaccaataaaccgagtaattcatagttcccatttcttgccaactactaatgtgtatcattaaatctgaccacagtgatttattaattagaagtcttctggttgtcaacaaaaatcagttttacttactatatgccagaaaaaggggaagatgtgatgaagacactggagtgtctcatagaatccaagatcaggaacacactcaggcttctggaagaactggtcccaggaattggaaagccatcagcaatcctgagggtcctttctgtttatgtctttctttctgcaaagcttttactcatctttcttactaactggctttctctgccactctgtcggtagagggtggcctcccacagccctaaactatgcagccaagttctagccaaatggaaagcctgtctttccatctcaattctaaattctctaagacttgggctaggcttgggttagatgtctatccctggactagtcagctgtggccaggagcggagacatgctgcacatatctgtctgcctctgctcacctccgaaaagtaggtgggaagatagaaaaaggggtagggaggcagcagacagagagacagacagcagagagacattgtaaggctggcagacaccttataaatatctaatatggtgagtctccataaactactacccttaaactatatcataggatcacttctaggttattttgttaaaaaaagtcagtcctaggtgaaacttaaaaaatttaactttaaaaagacgatatcttttaaaatatgcatataatttgagactcttaaggtaacgggatattcactatagttagtaagtcttagctttgtgtgtatatatgatttttatgcatgacactctttaattgctgggaggttctagcagctctgtccagcagaaatacaagataagccacatttgtaatttaaggttttctagtagccacattgaaaaagtaaaatgaaaaaggtgaatttaattttaatgtattttatttaaccccagtttcccagatataatcgttatatgaatataaaattaatgaaatgttttacattcttttaaaaacctttgaaatatggtatgtattttatgctttagcaaatctcagtttggaccatttcaggtggtcagcaattacacatggctagaactaagagcaatcagttttcttccacagtttttctaaaattttcttgtcaaaaatcttgatggtatgaattactcttttaaaaagtgcacttcaccagcaacagaaaagaaccctggaggggtatgggttttaaagctggtacaaaagagttgcccatttggaggatttactgcaccatgtgtattggtaaaaaagaaaacataatttttaaccaagtcaccaggctctaaagccagttcttgttcttctcagacttctgattcctggaattttactttaaactccttggatgcctcagtttgcttatctgtaaaaataagatttataatggtcctgtcccacagaagagattttcatggaatttaattgcaccaatatatttgaaagtgttttgaaagatatttaaagggttaaacaaatgtgaagcattattttaatttatcatctatgggtaaattactacattttggaatcaataatagttatcatttttaaaaagttttattttgttaattgacacataattgtacatatttatggggtaccatatgatgtttcgatgcattatacatagtgtaatgattaaatcagggcaattagcatatccatcacctcaaacacttgttatttctttgtggtgagaacattcaaaattattttagccattttgaaatgtaaagtacattattgttaactctagtcaccttactgtatgatagaacattagaacttatcccttttatctaatgtaactttatacctgttgacctctctccctctccctgcctgtcctacccagccttcagtaccactattctactgtttatctctatgggatcaactttttaagttttcacagatgagtgagatcatgtgttattcgtcttttgtgcttgacttatttcacttaatgtcttgtgggttcatccaggtgccgcaaatgacgggatttcatttatttttatgcctgaatagtattccattgtgtatatgtacctcattaaaaaaattcatccattgatggatacttaggttgattccatatcttggccattgtgaatagtgctgcagtaaacatgagagtgcagatatctctttgacatactgattttgttttctttggatatagaggttgagtatccctaatccaaaaatctgaaatccagaatgctctaaaatccaaaactttttgagcactgacgtgatgcttagaggataatgctcactgtactattttggattttggatttttggattagggatgctcagctataatgcaaatatttcaaaatcggaaaaaaaaatctgaaatcagaaatgctcctggtctcaagcattttgggtaagggatgctcaatgtttatacccaacagtcggattattggattatatggtagttctatttttaatttgttgaaaaacctccctactgttgtccttaatggctgtactaatttactttcctaacgtcttggtctgttttgtgttgctataaagaaatacctgaagctgggtaatttataaagaaaagaggtttatttggctcacacttctgcaggctggtaccagcatctgcatctgatgagggcctcaggctgcttccactcatggcagaaggtgaaggggagctggtgtgtacagagaacatatgatgagaaagggtgcaatggggcggggaggtgccaggctctttttcacaaccagtactaatgggaactaatagagtgagaagttacccacttctgagggagggtatcagtctgttcataagggatctgcccccatgacccagacacctcccattaggccccacctctaacattggggatcagatttcaatatgaggtttgtagggatcaaacatccaaattatagcacctactaacattgtatgagagtttccctttctctgcatccttgccaacatttgtaattttttgtctttttaataatagccattctaactgggtgatgtgatatctcattgtggttttgatttgcttttccctggtgattagtggtgaggtatatttttcatatacctattgccatttgtatgtcttctttttttttttttagacagagttttgctcttgttgcctaggctggagtgtaatggcacaatcttggctcaccacaacctctgcctcccagtttcaagcgattctcctgcctcagcctcctgagtagctgtaattacaggcatgagccaccacacctggcttattttgtatttttagtagagatagggtttctccatgttggtcaggctggtcttgaactcccaacgtcaggtgatcctcctgcctcagcctcccaaagtgctgggattataggcatgagccactgcgcctggccttgtgtttcttcttttgagaggtgtctatttaggtattttgttcatttttaaattggatttttttttttgccattgagttccttatgtatcctggatgagtcccttgtcagatgcatagtttgtgaatattttctccttttctgtggattgtctcttcactttgttctttcctttgctgtgcagaagctttttagtttgatataatcctatttgtctatttttgcttttgttctctgtgcttttgaggtcttatccaacaagtccttgcccagaccaatgtgctgaagcattttacttaagtgtcttctagtagttttcatagtttcaggtagtacatttaagtctgtattttaagttgatttttgtaagtggttagagatagggttctagtttcatttttctgcatgtgaatattcagtttacacagtaccatttgttgaagagattgttctttccccaatgtgtgttcttgatgcctttgtcaaaaatcatgtgtggatttatttctgggttctttattctgttgaactatctggaaaagaaataaggtaatacatttacagtagctattaaaaaaacctagcaataaatttaactgaggaggtaaagatctctgcaatgaaaactataagatattgatgaaaaaaattgaagaagacataaataaatgcaaagaatatcccttgttacgtatcggaagaataaatattgttaaaatgtctatgctatctcaagtgatctacagattcaatgcaatccctatcaaaataccagtgatatttttcacagaaatagaaaaaaaattctaaaatttctatggcaacacagaagacccagaatagccaaagcaatcttgagcaaaaagagcaaatctggagatattacgttacctgatttcaaaatatactacaaagcaatagtaaccaaaacagcatggtactggtataaaaaaaaacagacaaatgaaacagaatctatcatttgttgaggacttactttgtgccaggcactgttctaagtgctttatcgatatcatataattaatttaatcataataaccttatgaaggtactgttactatttctgttttatatatgaggaaattcagacataaagatttaacaaaccagcccaagctcaactatctagtaagtagttgaactggagttgaaatgcacttaaaaaaattgtggtgaaatatacacaatgtaaaataatcattttaaccattttaaagtatatagttctgtggcattaagtatattcacattatcatgcaatcattaacaccatccatctctaaaactttttaatcttggcaaactgaaactctatactgactaaacactagttccctattctcccatccccagcccctggcaatcacctttttactttttctctttgagtttaactcctctaggagcctcatataagaggaatcatacaatatttatctttttgtggctggcttatttcacttagcataatgtcttcagggttcattcatgttgtagcatatattgaaattccctattttatttttatttatttatttttattattattttcttttgagatgaagtttctctcttgttgcttaggctggagtgcaatggtgccatctcagctcaccgcaatctctgcctcctgcattcaagtgattctcctgcctcagcctcccgagtagctgaaattacaggcatgcaccaccacacccggctaattttgtatttttagtagagatggggtttctccatgttggtcaggctggtcttgaactcccgacttcaggtgatctgcccgccttggcctcccaaagtgctgggattacaggcatgagccaccgcgcctggcaaaattccctatttcttaagactaaataatattccattgtgtgtatgtacatttcatttatccatctatctgttggtacacatgtgggttacttctacctcttggctactgttagtggagctgccatggacacgagtgtacaactatctcttcaagaccctgctttcacttcttttgggtatctacccggatggtaattttatgtttaattttttgaggaactgccatatttttgccatagtggctgcatcattttacataccatcagtgcacaagggtcctaatttctctgcatccttgctaacacttgttactttcttttttccttccttccttccttccttccttccttccttccttccttccttccctccctccctcccttctttcctcctcctcctcctcccctcctcccctcctcctcctcctcctcctcctccttcttcctcttcttcttcttctttttttttttttgagatggagtctgactctgtctcccaggttggagtgcagtggcacgatcttggctcactgtaacctctgcctcctgggttcaagcaattctcctgctgcatcctcccaagtagctgggatcacaggcgtgtaccaccatgcctggctaatttttgtatttttagtagagatgggtttcaccatattggccaggctggtcttgaactcctgacctcaagttatctgccctcctcagcctcccaaagtgctgggattacaggtgtgagcccacctcgcctggcctctttttttttttttttttttttttttttaaataaaagccatcccaatgggtgtggagtagtatctcgctctggttttagtgtttcactaatgactagtgatgttgagcatgttttcatgtacttattggccatttctatatcctctttggaaaatggctatttaagtcgttggtccattttaaaattgggttgtttggtttttgttgttgttgagttgtaggagttttaaaagtatattctggatatcaatctcttatcagatatgtgatttacaagtactgttttccattctgtgggttgacttttcactctgtagatagtatcctttgatccacagaagtttttaattttggtaaagtccagcatgtctgtttttttctgttgatacctgtgctttttggtgtcacatccaagaaattgttgtcaaatgcaatctcaagaaacatattttcttctaagctttatttctgtctctgtctatctgtgcctcttttctctgtgtcatcttgagtctgtctctgtatctgtttctgtatgtttgtatctttgtatcttttttctatatatttataaaccaccaaaacatatatgtatcgtctctcttttcttgctttatttcttccttttcctttttttctagaactttttgaaagtattgtagcaatcatgacactccatgtatttcctaaaaataatagcatatttctaaactataattagtactgcctttagaattgggcacacagggcccttgccttgagctctctactttggagtgcctttcttgaatttttctaagtctccctgctgccttaatgcctgaaaggcagggtgccccaagctcttctctttaggagtctcatatttagaaatacagtaaatttcctaattatattgaaaattgaagcctaacttttttttttgctgatcttattgttcactactgtgcaccatatttttcttctaaattatttttcttatctttatatatttctttaactgattagcatgtacatatttagtattatagtcattaattacctttattcttctgtctctccagtagtgagttgaaactcttggaggaagcaaccatttcagtctgcaggtcattaggtaagtgggaaaaatgtgtgtggggtgttgttttcaaattttgttttagattttgatagtataatatgaactgaattaatgaagtaattactcttctttgatagcaatagtaataattttttctatttgtggcattcacagatgctgctagaaggtacccttcagtcaatagcaatatgacacatgcttggctatatctgcagtagtggtaatggactctgctaagccatagacactctttcgtcttgttctttttgtgaattttgaaatactgaaaataatgtgatttaccaagtgctgttattgactatgttcaccagaacaatattaaaatctattaagaatgtatattaggaagtttccataacaacttgatattatggcaaagatcatggaatccagaatcattttatgattttaatttcagctgtgctacctattagctgagccttaatttcctcatatagattgaggataaggacaactatttacaggattcttataaggaaaaattaggtaatatgaaatattcagtacaatgtgtgtcatgtagtcattgcaaaccatttatgtcagcaaatgttacccttttcaggtcttgtttctcaaatgcttaactttcaagttcatagcaattggaaggaaattgtatatatttttaaaatgcaggcagttatacttagattgcattggtgctttgaaaagtaagacaatgtgtctgtgaaatacctagggtacaggaatgtaataagtgagaacaatattctgttttaaaatcaggctgtctaggccggacacagtggctcacgcctataatcccagcattttgagaggctgatgcgggtggatcacgaagtcaggagttcaagaccagcttggccaagatggtgaaaccccgtcactactaaaaatccaaaaattagcaaggcatggtggtgggcgcctgtaatcccagctacttgggaggctgaggcagagaattgcttgaacccgggaggcagaggttgcagtgagccgagatcgcgccactgcactccagcctgggcgacagagcgagactctgtctcaaaaaacattaaaaaaaaaaatcgagctgtatggataactcccatataaactattttgctaaaaacagtttttgatgatttatttttttttttaaagagatagagtcttgctttgctgcccaggctggagtgcactggtgccattgtggctcactgcagccttgatctcctgggcttcagtgatccttccacctcagcctcctcagaagctggggctataggtgcatggcaccacacctgcctaatgattttattttatttttgtatagatgggggtctcctgtgttgccgaggctagtctcaggctcctggccgcaagccttcctcctcctaccttggacccccaaagtgttgggatattacaggtgttagccaccgtgcctgggcccaaatatttttgtttttaaaaacaaactatgttgataatgaaaaggtgttattgtagtagttgtcttgccttacaaccatagcttagggaattttttgctaaatagagctggctttcaaaagccatgtcgcaattcagtgctgaaaattaaggagttttatgtaacaatattagtgtagttactgtgataatggcttttaaggtgactttgggtttttaaaaaaattataaaattaaaagatgaaaaaacaaaaatataacaaagcaatgagaaaacaaagaaaaaattacattaagaaaactgaaagtagctgggagtggtggctcatgcctgtaatactggtaactttaggaggctgaggcaggagggttgcttgaggtcagagttcaagaccagcttgggcaacataataagaccccatctcttacaaaatctacatcttacccatctacacgcaaaaaaattgaaaaaacttaaccaggcatggtggcatgtgcctgtagtctcagctgcttgcgagattgaggtaggaggattgatcgagcccaggaatttgaggctgcagggaaccatgatggcgccactggactccagtctggacaatacagcaagactccaaatctaggggcgaaaaaaagcaagtaatatttactcattatacataatgtggaaagcatactaaaatgtaaatgaggtagtaattgctcataatttgaaaaccctgacataggcattgttgatatttttgtattttttcttctactacttattcaatagatataaatttatatatatatcatccaccacacacacacacacacagacacacacacacattttaatctgtgtttttcacttgacattgtatcaggaatgtgttacatgtttaaaaatacttttgggaacagcaaaacaagatatacatttattgccccaaattccagtaatgtgatggtatggctaaaataaaaatcatctcatattaaacagtacatgtgtaatcactgctaatcttttgtgacaatttcatataaatggtattatttatattttgtttacacgcagcaacatgtcaggaacctcttcacatcaataagtataagtgcatatcaactttaagggctatgtgagtgtacttagtttcctttttgaaaaaaaaatttttttaagtgctggtctactggcaacaattttccttctcttttttcttttttttttttttgtctgaaaatgttctattttttttcttggcttttgaagcatatgttttgctggatatagaattttagatagacgttaatttattttccgtactttaaaggtgtcatttcgttattttctagcttttcttgtttttgttgtgaagaaagcagtcaaccttattgttgcttctttgaaaataatggaatttttaacttcggctgcttttaagtttttctttttatcttttgattttcagtagccttagagtgatgtgctgaggagaggttttctttgtttttttgtcgcctgaggtttgtagagattcttaaatctgtgagttggtgtcttttatcagtattggaaaattcttagccattatgtgtttatatataaaatttttgttctattctgtctctcctctcctcctgggacgcttgttacacttctgttcaatgttttgtttccattgtgtcccatatacttgttaggccttttttcttttgtagtttacattctttttctctctgaccttcaatgagatattttctgttaattcatctttagtttctaatgttttccttttttttatttttatttttattttgagacagggtctcactctgtttcccagctagagtgcagtggcactatcaccgctcactgcaacctcagcttcctgggctcaagaggtcctaccacttcagcctcctgagtagctgggattacaggcatatgtcaccatgcctggataatttttaagttttctgtagaggtgggatcttgccatgttatgttgaacttctgggctcaagtgatcctcccaccttggcccccacaaagtgctgggattacaagtgtgagctactgtgcctggtactaatctttccttttgatatgtcccatttgctgttaaaactatctactgagatttttaaaacaagcttttaattttagaatagctgtagatttatggaactgtttcaaagctagtatagagcattcttgtatactcttcagctatttcccctattttattatcttattttagtatggtacatttatttcaactaaggaatcaacattggtacaggtataccccagagatattgtgggtcagttccagaccactgagataaagccagtattgcaataaagtgagttgcatgaattttttggtttccccatgcttataaatgttatgtttacattatactatggtctatcaaatgtgcaataacgtgttaaatgtatgtatcttaattttataactgtgttgcaaaaaaatgctaacacatcatctgagactttaatgagtcataatcttcttgctggtgacaacatgacatcaaagatcacggattcgaccaggcacagtggctcactcttgtaatcccagcactttgggaggctgaggtgggtgtatcacctgaggagttcaagaccagcctggccaacacagtgaaaccctatctctacaaaaatacaaaaattaactgggcatgatggcagttgcctgtaatctcagctactcgggaggctgaggtgggagaatcacttgaacccggaaggcagaggttgcggtgagccgagatcacaactttgcactccagcctgggcgacagagtgagactccgtcacaaaaaacaaacaaacgagatcactgattagagatcactataacagatataacagtaaaatgcttgaaatattgcaagaattggctgggcatggtggcctgtaatcccagcactttgggaggccaaggcgggaggattcttgagtccaggagcaacatagcaagaccctgtctctacaaaaaactaaaagaaaattagccagacatggtgactcctgagtagctactcaggaggctgagatgggaagatctcttgagcctgggaggttgaggctgcagtgagctgtgatcacactacgacattcagcctaggtgacagagtgagactctgtttcaaaaaaaaaaaaaaaagtaaataaatacgaagaaattttgcaagaactaccaaaacgtgatgcagagacatgaagtgagcacgtattgttggaaaaatggtgctgatagacttgctcactgcaaggttgccacaaaccttcaatttgtaaaaaatgccatgtctttgaagcacaataaagcaaagcacagtaaaatgaggttatgttaattttattgactaaactacacccttcactcagactttcactaactttctcctaatctgccttcactgttccaggatcccacctagggtgccacatgacatctagtcatcatgtatttctctggtctgcaacagtttctcagatttcccacattttttatgccttttgatgattttggggagtattagtagggtattttccaaaacgttcctcaatttgagttgtctgatggctttctcatgcttagactggggttataggtttgtggaaggaagaccatggaggtgaagtgctgttctcaacacaccgtatcaaggggacatgctattaatatgacttatcactgatggtgttgatgttgatcacttggctgaggtactatttatcaagtttcttcagtgtaaagttgtttctttctctcctgatcccttcattttcaaaggatagtttttctagatatagaattcttggttaacattttttttctctttcagcactttgaacatattattctactgccttctggtctctatttttttcagataaatctgacgttaattgtattattgttcccctgaaaatcatgagaaattttttcctgctgcttgtaaggtgctctctttgccttttaaaagagttttttggccaggcatggtgactcacacctgtaattccagctctttgggaggccacggcaggaagattgcttgaggccgagagttagatgccagcctgggcaacatagcaagaccctgtctctacaaaataagaagaaaaataaaaattaacctggcatggtggcatgcatctcttagatgtgtagattaatgtttttcaacaattttgggaaattcattgcctttttttttctttttttaaggaatagggtctcacactcttatccagtcttgtcttgaactcctgaccccaagcatgcctcccacctcagcctcccaaagcactggccattatttttgttaggctttttgtgtttagctttattacttttttcctgaatgtacacataaggttttctggatcagatttctttttttttttgagacagagttttgctcttgttgcccaggctggagtgcaatggtgtgatctccactcactgcaacctccacctcctgggttcaagcaattctcctgtctcagcctcccaagtagctgggattacaggcatgcaccaccacacccagctaattttgtatttttagtagagttggagtttcaccatgtcagtgagactggtctcagaactcctgacctcaggtgatccacccgccttggccttcgaagtgctgggattacaggcttgagccactgtgcccagcccagatttcttattaaatacttcacagtaaataagacgtccattggtccttctttgtcctagttcttaacccactaggatgatgtggtgagagccaggtcagttgttttttatgatagtcagactccctgtaggtgagggatgaggaaaaacgtttgccagctttataaagggtaaaaaagcagctgtaccatcctctcctgaaagagtgtgctctttagccctttggcatataaatacaatcttttcaggagccgggtatcctcacttcttgttttggcattttaacctatggatatctccaagttctgtggcctcatttgtcctttttttttttcttttttctttttgttcatgagactttttcctttaacccttggtgataaatatttctcattatgctttttctctttatggtttttcctataatttgatgaggtgttttgattggtgtacgaagatctttttcagttcagaaggtttttttttttctttttttcattatggctctgattttgtgttttagtttcttctccctacctcttgatcacctgtaatgttcaggttggatctctgttctttactttctgttatctttttgtctctgttcttttctcatatttcttcctttgtatgattgatttcaatgttttctacactgccagttctcctcttttactattgtagtgtatgttttagctgttattgcatttttagtttatttcttaatcatttctagtcgtttgtagatcttttaatgtcaggctgctctcttcttttttttttttttttgagatggagtgttgctgtgtcccccaggctggagtgcagtggcgcaatcttgctcactgcaaccttcacttcctgggttcaagccattgtcccacctcagcctcccaaatagttgggattacaagcatgcgccaccatgcctggctgatttttgtatttttagtagagatggggtttcaccatattggccaggctggtcttgaacttctgacctcaagtgatcttcctgccttggcctcccaaagtgctgggattacaggtgtgactcactgcacccagccttttttttttttttttttttggagacatggtctcactctgtcgctcatgctggagtgcagtggtgtgatcatggctcactgcagcttcaacctcctgggctcaagcaatcctcctgcctggcctcctgggtagctgggaccataggcatgcgcaaccacacctggctaatttttgtattttgtgtagagatggggttttgtgatgttgcctaggctatcttgaacttctggccacaagcaattctctcaccttggcctctgaaagtgctgggattacaggcgtgtgctactgtgcctggcttgctctcttttcattcatgcatttcccccagtggatttctgttcttttttaaaaaataggtgattaattttcctgttgtctactgttgattgctgtgtattaaaattcttttggcaattttgatttagcttttcttctgaggtttcagcgtaactcatttcttatcctctggttgctgttgttgttattttctccttttcattaaactaacacatatttatggagcacctactatattacaggcattatcctataagcttgggctgtgactgcaaaaaacactgacccgggtctctgacctcatggagctgtctatttcattgaggaaccagagaataaataaatatatctggtttatacaatgttggctgttcagaaaaataaagcagagtaaggggatggggtgtaacccatgaagctgcattgtttgctcccagagaggctgtgtttatttcctctgttgcttatatagatcctatagatgcttgttgaatctgctgttattttagtttgagagcaagttgatatagtttcccaacctaatttatagagcccaagaaggttttatttgtccaagtttcttagtttaaatgggaccttcattatcctcacttcttggctttggggtatgagggaatttggaagttcccagattgaacatctgtatcagtgtctttctacctctccctccaccgtatgctgctgtgttgtccaggccgaatatgtatctctaaataaggattcttaaaaaaaaataccactatcttattaaaaaaacaacttttaatatcacaaaatattcagtgttcaaatttgtaattgtctcattttgtttgaattgggggccaaataagttcacacattatttttggttatgtctttacatttcttttcaaagcaagtttcccttttcatctgtctttttcttcttttccctctctcagtgtatttattgaagaaaatgggtggtggagtttcccacaacgtagattttgttcattgtatccttgcgtggggtcatcttgtcctctctcctctgtattttctctacattggttgttggattttagagctcatgagtctttcggtgagatcttagaaaagtttgtttcagggtctagaagcaaatttaatctctcatctcaaacagaaatcctgtctacaatacccttatctgaatgttacccaaactttgcttgaattcttgtagggatgggggcattcccttctttacacaagcatcactagttaacagactgctacaagttcaagctctagcatcaggtaagttagctctttattaagcattcttgttatcttaattttacagatgaggaaactgaggcaggggccagttaggtaagttgccaagtgttctacagctggtcagtggtggaactgagatttgaacttcgtcagagtctataatctagtcccattacacttttctgctttcctgtcggacctcctgtgttgttactctggctcccgaagctcattcagcttcaacatagcattttatttgcaccaattaactgtgatcatgtaaaatttcttttcttctaccattgagatattttggaatcttgaatctaccatggagtattgtttaaaatcattgagtgtatttaattttattaacttattgccctaatcttcatcttatccaaaagagtatcatggaaactttttaactgtcttggtaggtaagctccatgaagacagggagttctctttacaagtatctccttagtatctgaaacagtgtgggcacatatgagtagctcaataaatacacgctgattgagtgaatcagtgaagaaggtacacggcgctttaattacatcaatcaagtagtcgggttactctttccaaaaacacaagatgttttgttttgtttttttaaatagctaatcatttatacattcaacaattacaaggccattcagtaataaagggggctgttgaatgaacaaagatttcaaagttgggattctgagtggtgattgtagtcatgttaccctcagcttagtttgtttcagcattttgtttggatttacaatagctagataatattaagtcccacagagatgcgtttgcaaaccttaactattctttttttttttttcttaaaaagtttaccctgaggtctctgggtattctttcattaaccctaaagctttaaagaggaataggacatttttgtttcaaagtgaaactcttaacattatctactatctgatcacatatctattcttgattgtgaaggctggataaaaactccgctgattgacaacaaatgttgcaccttgctactcacagtgggattctccagccagcagcagcagtagtggatgtcactggggaacggtagagatgcagaatctcagtgcacatttcacacatgtgcagtccatttgcatttaaataagaatgacttgtgatttaaatgcacattaaactttgagaagtactgtcagcttcagttaggagtatggtggacctgggattctgaacttccaccaagctctcagataatgctgttgtggccggtccatgagccacgcttggaatagcaaagtgcttgacattttatcacagttagaaagttaggcagttacttgaatagactcttaagtcatgacaaaaatatatatgcagcagggagtgagcttggcagttagtaagcacaatgcaggtatgctgtaatgctgtacttattcccatgtataatattttaaaatatatatgtatgggcctgaattttaaaaaaatattctggaaaacttcatttttttcaaatcttgacacatttcagtaagttcaaatataccagcttgggcaacatagggcaaaaccatctctacaaaaaatacaattagctgggcatggtggtgcatgcctgtagcactaactacttgggaggctgaggcagaaggatcacttgaacccaggagctcaaggttgcagagagctatgattgcaccactgctgtccagcctgggtggtagaccgagaccctgtttctatgttaaaaaaaaaagaagttcaaatatatgcgaaattcccagatctgcataagaatgaactttcctggcagcctaagtcagtgtgtttgagtgtttgcatttccagttttcaaactagttaaaaatacttcagaagagaaacaattatccaggactctggaatctcacattttgaaaaccattggtcaaggaaaaagactgtgtttgctactaacatattgttgactttaagctcagcgcttagcctttctgagcctgtctcttcatcagtcaaatggaaggttctacaaaatagtctctcccttctgatgaattcttagcttctgtgacttgctgtgcagcccaatagagctttatagtttccttaagtccaatttcttgattatagaggttgcttcaacctagcagtttaaagtcaaagatttgagccagttgataaggatgtttccttgagcaagtaacaacctccaggtgaggatcggtgaaatgcaagtgatactagtgcttttcctggagggttggtgtgaggattaaatgagttaatgcatgtaaagcacctactctatgttgttcagcatatgttagctgttgtttcttttacagatgagaaaactgaggttggagaagtacagtgatttgtctgagattcagtattcagttaattatagacctggatctagaaactaaatcttctgattcctgatacagttgctgaaatgcccatcgtttaaagttaaaaaaaaattctttaaagttttgtctggtcaaatagctccccttctagccacactgctttgttgatatgttttcttaatttttcattcaaatgatttgtaatctgaagagtgttttagatttaataaacttttatagtttattatattctatatactggagacatagataatcaatttttgagtttttaaaaatctcctttctagagaaagatttagtgtgtaagttgaatgtgtctattaactattttttcctttatgattttggattctgagataagatggctacttgtactgtttctatcattttcattttgcaaatcagtttttgatgttcagaattaagaccaagagcagcagtttctctcattgcttagttctctaattaggtatgaaattaacagtaaagttggtcactgagcaattttaatatgacatttggttttataaatgttatgataagctcactttgattttagttcttaaatttaactttttaaaaccttttcttctcttgcagttgaaaacaatcctcgaacaggaaatcttggtgcactaattaaggtcttcctttctagaaccaaagaactaaaactttcagcagaatgtcagaagtaagctggctaattaaaccatgtttgctttatatttaacaatgtgaattttagttttcatttattgatggaaatggactgtggtcttttgaaaatctctgtgaaggaattattctcattattaagaaaaaaaggtagagaggttttaggttagtgtctaagtcactggggtgagattatagattcgggaatctgatttcagctttttagacaatctttagattatattctttaagaaggtgaataatgatgtaattatcgttaagaaggtaattcccctcccccccattatcactgctgctgctatctagtttaaatgatgacttagtctgagttttatttcattctacatctgttgcagttatttccgttatattctttacatcaatggaaggttaactttttatgcactgaagcatttttcaaaaccatgtttggatgtcagtctctgaaaagattaaaatattttgcattgtcttgcttataaacaaattacattgaatccaataaagtttttcttgggagttcatggtcattaatacaaataaaaagtattttaccgtgctgctggcaatgcctcgtcgaaaattttggttacatatttgcatatattctttttatgttaccacaattttttaaattttttggtagctttcttctcttttaatcgcatgtacgtggtatacctattaagaacaaagaacagtcattcctacagtcatcagtaaagatttttattaagtagattcactatgtaaagtacatggaatgaactatgaagtaaaacataatatcactggtacaatgaaataaatcatgagccattaaaagatatggacattatcctaatattaccaataggatggacaaaacggttgtcaaatcaggaagaaatcatgaactagaaataaactatggtgcttatgtttaaatattgattcttgtatgattttggtctttctagccacatcttcatttggcagacacacaatgctttgtttattatttgctgtttgctgaaagtgttcatctgtcagatgtcagaggaggaattacaacttcattttacttatgaagaaaaatctcctggcaattacagtaagtattgtttttaaagatgttctggatatatcatgtgtaacatttaaggataaaatttcaggaataaaagtatgattttgaaaattccagttatccttataattttcattttaaaatgaacttatactgtcattttttctttttctgtgttaatttaaatgagtgaagactcaagcgttttttgtttttgtttttcgttttaaataagaaagctggtggggttgaagctttcatttattttgactttcatgcatgtggatgaagaagaaagtaatataaaaaataaaactcacacaaatatgtatttctttcagaaaacagaggtgtcagttttaaatatcattgccaagtcaatatattattaagggagccaactagtcagattttatggtaaaggttactttcatagcgtgcagcaatagcttctgggtctgagtgtctttgggactacgacactttatcagaagtaacattttcaaggacagttttatgatgccaaagtgtctcatctttttctgaagatacagggaaagattacccttcacacaatctttcctttctgagggcaaggcagtgttgccccatagttttccgagttctgttttcaaaatagatctctgccctcatcaggctgacagcgtcacctgtgtgattcaaggtcatatgttaacatctcttgtgggaacaggtattgggagagaactttgagatgtgtatacttttaatggaggtctgtgtgctatgtggatttcatgcatatgtataataacactttcatatacctaggagtaatttttcactgtggtttcaactgtgttgctaaatacgtgtttttaaatgtcaaagtcaaatattgacaaagggaaacaaacgtataaaagagttactgttcatccaggtcaacatcacaatgtactgatttttcagtatatccatgtctatggggaatatttcttaaattctattatagaatttttatttatatttttatttttattctttttgagatggagtctcgctctgttgcccaggctggaatgcagtggtgcgatcttggctcactgcagcctctgcctcctgagttcaagcaattctcctgtctcagcctcctgagtagctgggactacaggtgcattccaccaagcccagctaatttttgtatttttagtagagatggggtttcagcatgttggccaggctgatcttgaactcctgacctcaagtgatccacccaccttggccttccaaagtgctgggattacaggcatgagccaccgtgcccggcctagaatttttaaaaacaatattatggggaagtagaaaagattctgtggaaagttaaccttttgtgcattcaagcatttcttaaaactatttttagatggcaaaaatcttatggaaattctggttatatcatttaaatgtattaaggtattatgttacattttgagcaaatgaaatgacatggtacaagaaaacaatagtttacaatactttcaactcaagtagcagagtgaccatgtgtatttatctcttctccctctgagaccccattacctgatggtagagcaattttctacacatactgttgagcaacttaggacagtcatttcatccttctttaggctccttatggcctctttcaagatcaggaaacggttttggagaaatagaatatgaatttctgttttactgcaatctttttcttcattcttatcctcagtgtatttccaaattagaaaaggacattcttcttgactcacactttgaaaatacgattttaccatcttctaacattttaacagcttttctgtgactggccaccttgatagccatttggcaggttcatgtccaaggagtctatcgcctttcatttctgtaaggtccgaatctcactaagttctgcaggttttgagaaaactgaaaggtggcaaacatcacagggcaggaaactactgcctcatagcaatgctgtgtgcaaggcatgcagaacatttagcaggcaagagctcttcattttctttggtcagaagtttgtagactaaatggaatttgctgcagtttacatatgccctgtccccaaataggcagatagatgagcagactctagtttgtgcttgagcaagatatcagcaatcttttgttttctgtttatgtggaaacatttttgttttcctctactgatactggacaaatatggttgagtgtatttaaattcaagtttcatccttgagagcatactgaattaaaaatatcacaattaagtttgtttcgtaagtgttctaaagtttctttccaacagatgacatagttggctggttgcagggaagggaaatcatatgttctacttttctttgaaagttattgtattagggttctctggagggacaggacaaatagcatagatgtatatatgaaggggagtttattaaggagtagtgactcacatgatcacaacgtgaagtgccacaataggccctgtgcaagctgaggagcaaggaagccagtttgagtcccaaaacctcaaaagtagggctgacagtgcagccttcagtctgtgtctgaaggcccaagagtccctggcaaaccactggtgtaagtccaagggtccaaaaacagaagaatctggagtccagtgtttgagggcaagaagcatccagcatgggagaaagatgaaggccaggagactcagcaagtctgttccttccatgttcttctgcctgctttattctatttgtcctggcagctgattagatggtgcccacccagattgagggtgggtatgcctctcccagtccactgactcaaacgttgatctcctttggcaacaccctcacagacacatccaggaacagtactttgcatccttcaatccgatcaagttgacactcgatattaaccatcacagtatctcaggtattattctacatttcatagttaaaatgtggataactttattattcttgaataaagcaagcatatcaattttagcagttttatttgctgtcatcttttattttcccttctgtcccagaagaccatttcatggaaggtcacttattgttttgtccagttttgagttagtatgaattactacctcattaactttgggggatagggggaaggggataggtactgaaattctctttgatgctgttaaaaaaatgttaaatttcagatactgtaccaagttataatttattaagaatagtttcctataaagggtgaataaaatgacaatgaatatgtgtgtgtgtatatatacatatatatatgtgtatatatgtttatatatatatatttttttcttctaaagcccaaggtaggtatagatatgtgtgtgtgtgtgtgtgtgtgtgtgtgtgtgtgtcttttcccctttcccgctttgtaactgtgagagccccaggtgtttaggggctgccccacgagtatttcccttggataaaaatgtttaccttgtcttctcaggggaaacaactctccagtttcactgtagatcagccattcctttcttggattctgtgctttctactctgaagtaattcctgttgaacttttgagattctgctctaaaaaagataggcagccaattttttttttttttgagacagtttcacttttgttgccctggttggagtgcaatggaacgatctcggctcactgcaacctccgcctcctgggttcaggtgattctcctacctcagcctcccaagtatctgggattagaggcatgtgccaccatgcccggttacttttgtatttttagtagagacaggggtttcaccatgttggtcaggctggtcttgaactcctgacctcatgtgatctgcccacctcggcctcccaaagtgctgggattacaggtgtgagccactgggcctggcctaggcagccaaattttattgaagctacctttcattaagctaccttggaaaagggagctgaggcacaggaagcaaactgaaccatcctaatatttttagagattgagcatttgtcatttcaccaaaatttatttcaataataaaagtccctttgactccacatttgattagtggtactggaaaaacaggtactgcttcctcttccccctaaactttcacaggcaaaatacattttctgtctctttctcagtcactaagtaggaaaggaacataagaccttctaagttgtttctgaatatagctagattttttgctggtcttgatcttcttttgggattgaccattatgttctctgactaccatataactgtatgttatagtatagacttaatcaaggattttgaggaagttaactaagttggtgtgtgagagatactgcagaattttggtattttgaatgttatatactttatttttttctaggagagaatatttgtgagaattatgtagaatctaattaatttaactattcccaaaccaccccatcatctttcacagttattgtttatcatttagcatgattttcagagcttgtgctttatacattgagtttgagtttcaagagatggatatgtttaatttactattttgatcattagccttctatattttttaaatatatactgatgtctgaagttagagcttttaattagaattgtgtcttgcgtgtgttagttttgttaatgctggccttcatgtttgtgatgccagtagtaccaaaaacatagttctgcttggtaagttgcaaaccttcccatgaagtgctagcagcaagaatggagtgaatgtttatcctcacagggcccaagagcatagcccactcaatacctgcaaacccagcactttgttttgtattatgtcctacaaaatgtgcatatttttactttatttaacgtgatattgtcagaggcatgggaaccagaacaactccatcttgaataggagctgggtaaattaagttgaaacctaccaggctatattcccagacagttaagacattctaagtcacagaatgagataggaagttggcacaaaataccagtcatgaagaccttgctgataaaacaagttgcagtgaaggagccagccaaaacccaccaaaaccaaaatggccacgagagtgacctctggtcatccttactgctacactcccaccagcgccatgacagtttacaaatgccatggcaatcttaagaagttaccctatatggtctaaaaaggggaggcatgaataatctaccccttgtttagcatatagtcaagaaataaccataaaaatgggcaactggcagccctggggactgctctgtctctggagtagccgttctttcattcctatactttcttaataaacttgctttcactttgcattgcggactagtcctgaattctttcttgcacgagatccaagaaccctgtcttggggtctggattgggacccctttcctgtaacatatttctctgtcctgtaacaatatcatttttattgtaatataaaattatttttcattatataccattaagtgaattgatgcattttagagatatactgtatttattttggggtccaaatctcagagtatccctgcaccccccacccttgtccaagcttgagaagcaaggttttttgttgtgcatcctaggtaacctaatgtaagggtagtgggagaatgacactttttcaaccataggccactttatcaagatggttatctcactgaaagagccatctctgtggtaatctctgtgattctgtctgcatactgacagaccttttctttctttttttttaatttgaacctatcattgtgaatatatgcttcctttatacagagttgacagttcaggattttatacatggttttttctttttcaggcagagtcttgccctgtcacctgggctggagtgcggtggtgcaatctcggctcactgcagcttccacctcccaggttcaagcaattctcctgtatcagcctcctgagtagctgggattacaggtgcctgccaccatgcctggctaatttttgtatttttttagtagagacggagttttgccatgttggccaggctggtcacgaactcctgacctcaggtgatctgcctgcctcggcctcccaaagtgctgggattacaggcatgtgccacctcacccggccctatacatgttctttagtgtttataattgagcctactcttggtccaccagcttaagtccaatgaatatcttttaagactaaaaactttctgtttttggcatatgtaattatttttaccttagtcttccatgttgttagtttgagatttctactttagccctttttatattttctgccaatttctttttacagttgataaaagagcaataaaattaaatgattacagagatactgttgaaagggggaaaaatggagcatcaccatgcagtagctgaagacatccatttatcagctgatatatgatatctgatttaggtatatgaaagagtggggtcgataatatacagtggtacaggttgtttgaaggtcgaatttacaaaagtagagggccatctgcaaacaattgagcaaagtcaactgaggcatcttaggtatgttggcttattccacatacagcatttttttctttattccaatccattgtaatactgctgtgatcacatggatattgctggcattttcagtgaagcagtctttatgagagtaatgtgactgtcagtaagctcttagtttgtaatctaaatttgtgaggattttgtatttgaacattttcccataggctatgtatgatgtggtagcagattgttagggagaatttgtattattatatgaggatagctcttccattagtccatgcgtttgagaatcagtcaaaggggacaaagccagccctaggcaaaactatgaagtaatacaaaattgtttccattttccttttgccttcaatgtgagtttttctttcctctggcttggtattataccccattcttgccaaggtaatactgatatttatttcacatttggcgtcttataaatccaatattttaaatccttaggggcctaaatctgctgtttgtttttggaaacgcttctcatggcttgtttccttgtgtatttgatgtcattgattgtattattattattattattttgagacagagtttctgtcactcaggctagagtgcagtggcacagtcacagctcactgaagcctcagcctcctgaatagctagggctacaggcacataccattaagcctggctaatttttaaagattatttttggtagagatggggtctcactatgttgcccaggctggtctcaaattcctggcctcaagcaatcctcctgccttggccttccaaagcactgggattataggcatgagccaccacacttagccttgtttgatcttatttgaggctccaaataagggagagatttgcatttgcttctaaagggatccagggcctgtaacacctgatgccatgttagcatcctgcagcaattcttgacttaatgtggagtctcaggttcaggccccattccttgccactgactgaggcttagtcagtgggcttcattctaactggcattcatcctcagggttacctatcttagcgtttgcttacttctcagtgttttactctggattcaagtccatttatttgctcgtaggttgttcttttggttatagggttggagtccttagaaatttgctttacattctgggaagcccatcaatgcactaaaaagtgttattttagccaagaactagatgttttgtacaggagggcttattggagtaactactccaccatgctgcaatgatagtttctttttcttttattttggagacagagtcttgctctctttcccaggctggagtgcagtggcacgattttggctcactgcaacctccacctcctgggttcaagtggttctcctgccttagcctcccgagtagctgggaatcacaggcgcatgccaccatgtccagctgatttttatatttctagtagagatggggtttcaccatgttggccaggctggtcccaaaccctgacctcaagtgatctgccctccttggccttccaaagtgctgggattacaggtgtgagccactgaacccgcctatagtttctttacaattattttttgtttatttattttttaaatgagggaagaagcctttggagattgagaggctgaagataaaagcaacaaagtgggggtggtgggaaataaagctgaaaggaaggtccagggaagtaggaggtgctaggatgaagagcccagagagggagttagtcctgttttgttttgttttttttttttttctgagatggagtttcgctcttgtttccgaggctgaagtgcagtggtgcgaccttggctcactgcaacctccgcctcccaggttcatgcaattctcctgcctcagcctcccaagtagctaggattacaggcgtgggccaccatgcccagctgatttttgtatttttagtagagacgggggtttcaccgtgttggccaggctggtcttgaactcccgacctcaagtggtccgcccatctcggcctcccaaagtactgggattataggcgtgagccactgcgcccagcgttattcctgttttgaaagagattaccacctgtggcccagtgggcagctctgtgagcactgaggggagggaggcagcagatcagctgcccagacctggggcgagcaaggtgctaggcccaagacactgtatgacctgtgagtacagctttgtggagagtagaaaagggacagggactcgacaaagccaagcggaagcctggctttaatggcacttccatggcacaaaacagttcaatataaacttatttttaaaaaattattttgtgggacttattctcaagcatagtagattaaacatgcatgtttgctttctcctggaactccaataaaatatcagcaaagggacttctaaaaagtcatgaatttattagattgaagaagagaggggaacacaatgttaataacattttgaaagttggaaaatggagtaatgatgagcttcactgatctgtgaaagctgaaagctaaatggcttcaaggttggagaactccagaaaaaaagccagttcttactccagaaccctggaaagtcttaggaatcagaagtgccaggggtctctgaaggcattcaggcttggttggaagaagcagttctgtccaaggttctgtcccttcccatgtgttaggaggccaccccccttcccagtttaatactagagatctgttatccatagaggctgaacccagagagtctcctgaatgaactctcaggcaatggggaaggagggtggcctactgagacgagggctcagtggaaaggccacatatggaagggtaaggtatcttgactaggctgctagaatgctggcaccaggattttacccaccctattccctttcctgccagattagtggatactcttatagagaaaatgaaccaaaacggggaaaaggcttacatttcagcgtcccctagtgaagcagcccgaaaccctccagtgggaaccgccgtttggcaggctctgcctgtgcacaccgcgctttcagtcagcattggcctcacgctggcaggtcagtggagagccaaggattccaaacagtgaaggcagtggctgacttgtgagagatcaaaacgaaacaaaaaagtgatacaagataggaaatttgtggaagtatatttaaaatttgttaattaccccctgtctaacacaagcagtttcctttccattctccccagacttaaaacatttttgaaactctttctttggaatcaccttcaaaacctgtggcatgtttgttttgccaaactcggtggcggtgagtcctgtgaaaccagctttgtttttccagatggctcaggtgcttcggctgccacggcagcaggttctctgctctcttttctctgctggaactgggccctagagactggggcaggcggtaggtagctcaggaggtaaacccaaaattgtatagtatgtggttgggtggtttttgctttatttgtttaaataccaaatttaataatttaaccttattagttataggtaagcaatgcaaaaaacaaacccatatggaaaaatgtggcccagagaaaaaagaaagcatggacttattcctttaaaatattgacttgtaatatataagacttgtaatctgtatctgcagaaaaacaaaagtgcctctaggaattcctgaactgttctttggtcatataataggtgtgattgttttgtcatatttctgtctcttctctccctttctttcccttatgttatcagtggaacaaaatcaattaaacttttctataggcacattttataatcaaacctggtagagtatattatcttttagggtaattagaaacatttctgtttgaccaaaataatagcagtcaaccagaattattactgatctgattggaatggtacaggacacaagcttataaatactgtagtgcactgaaatgcagatcacttttctttttagaagagtccttttgcctttcctctttatgattaacctacaagagacatttttggttttgctaattagaagtttaaatctaatattttagaataacttcaatgttagtttcactattaaagtggcaaaaacatagactctaccgtgagtcttttattttctgaatataagtttttaataaatataatttaattatgtgtcttccattttaaagaagccaattttattctgaacttctaaggtactcttttaacctatttttggagtacagccctgttcgattaagtttttagtacttgtatttggcacagtgtaattttgggcagcattaaaaaactggcagttcaaccttctgaacgcaaagaaaacaaagacaaaaactctgtcttttaacatttcttttaatgactgtatgtattctgatttaaatccatatgtttcatttttctggttgctttgttttctaatgatcagtgagtgctttttaaaaataatttttttactgtcttcccttcccctcctactgtgttggaaggcatttgattaggacagtattgtactgttctctgcttctctccctaaggacaaaacaacagtgctgtctcactcagcacatggtgctgaatggatgctgaatagaatgaactaacagggactgcagcttaattttgggtatagattattagaaccttaagggaccctagatatcatctcgcttgtctacttcttcccctggtgaagttcttagggactagagcagtggggctttagagtgagaaaactccagggatagggctgggattttagtgaccttgttctgcacaatacggatgataatagcttatatttattcattgttttagattatttgtacattggattttgaaggagtcaagaacttctagtatgtgttgatgaatacatagtgtgtcatctttatgtataaactaatatgtagtacttcagatgtctccctcctaaccgggcccatagtacttggggttttgtgtttacagtgttcagtaaaacatgaattggttgaatattttcccccaactttgtgtagaaacatatctttaaaaataatttaaaggatattttccttttaatttttttccttgagagtatagatttgagttccaatctggtttctgccccttactctaattaaactaacctatctgagccttgatgtcttcatctgtaaaatgatgatcataatcattaactattcatcaagagttactgtcaggattaacgttaacatgacattgagtataaagtgctcatcacaatgcctgtcaaagggtagagtacttggtaaatgtttgctgttaatatgatcttatagaaactaagacttaaaatattaaaatatttgtctggacctattgtggtaatttaaaactctttaagggagaactcttgtttgtttgtttgttttaagagatagggtcttggtatgttgcccaagctggcctccaactcctgggctcaagagatcctcctgcctcagcctcctgagtagctggtgctatagcaggtgccactgcaccaagcattgagagagaactcttaggagagaaatgttctttcttagagaactctaagttataaaactttacaatacagtaaacacactgaatctttgcaaagacctttgctcaaagaacctcagtttattttgtcattgacctgcaaatttcaagaacttttaagattctttttactgtatgaaatgcttgaatgtgttactatactttttgtaggtgagtttatatttattttttggaactaaggaagatatttggccttataagaaagctaaggtgatataagtgctagttgggaaataatgcaatatgaatggcttgcttgatgtcaaacctagtaagcagtcaaatcttgtcaatcttcacttaaaatacaattatttacttctagattagctgagaaacaagaatttagaattctgaggaattttttttttagtgaacggaagtcttaagatatttcagctggaaattgcttattgtcttttgttagagctttggccttgaaatattacattttacttctatgaaatatgtttatcatcatcttcattattttattagattggtaacaaagctgtgtgtatactccttaattgacccaactgtaaatttggccgaggttgtgatttgagtggcacatggaattgaatagagaatccttgtcatcattttaagatgtaaaaattaggtgtttttatacccctggaagttaaaaaatcaaatcaggcaccatctgtggttcctgagtgcttggtctctcaccttccgtaattaaaaaactgtgctggctgcttggctgaacagggatgttattaaactggcatttggtctgaaatgtttcttagggaatcactgagtgattttaagtgttctttcttgggcctgggacattgcatcctgtagaatgagttaaggagtgaccatttagcaaacgtacattgagtatatattacataccaacaaatcaacttgttggagtaggttgttaacttgagttatgttggacagccttggcaatgagagggattttagttagatctggtaactaatcatgcagtcccagagacaagtgtgacttactcttttatttttttttcttcactaataatagagccaagcccgatgtttcttggagtgagatttaatttggttgttgaacttgagtcttgctgtgtatcctttttagcatcgattgctgtgttcagcatgatttaatattctttttaagatttgtacttacctctcacggggttactgtgccagttctttgtggcaaagcaggatgaaatttctttataatttctgaatgctaggtgatattgtagcctagaaaagaaattgctaaactttttttttttgagactccaagtgctttgatgctttgcaattaactgctggattttttctgagatgcttgggctcagttcagcaaattgtattgagtacatactatgtgcaagctctttgtgagtcatcatcctctagaagtatagagtccagtaggggcctgcctgcttgtagacaaaaaatgatggcataatgtaaccaacatatgcaacgcaagaggcatgcacaaggcatagatactttatagattattcagggtgagacaagggagtgggtttcatggaggatatgaaactgaggatggttcagatggatacagatgggctttttaaaaactaggtttttattgttggaggctattccaggcagagggaatgttactgaggtgtgaaatggcatgtagtggatagcttggcattgctggaatatacactgcagtactggaggaagataaatgtagaaagggatgcaggacctatatctccaagagtctggcatgctgtactttggagcatggaatttttctgatatatattaatcagcttaaagtaattgaaaagatctaagccaggagagtgaaaggatggagtttagttagctctgtctgattgcaatctggagtttggattgcagaggagtaaaattggaactacaatactaactagttatgaaggttaaaggagtccaggagtcagttttctttctttctttcttttttttttttgagacacagtcttgttttgtcacccaggctggagtgctgtggcgcgacctcagttcactgcaacctcttcctcccgggttcaagcaattctcctgtctctgcctcctgagtagctgggaccacaggcgtgcgccaccatgctggactaatttttgtatttttattagaggtggggtttcaccatgttggccaggctggtctcgaactcctgacctcaggtgatctgcctgccttggcctcacaaaatgctgggattataggtgtgagccaccacacccagcccaggagtgagttttaatttagtaaacttgtttagctgcactgtggtgatgagataatgaacaaaaaagcatgacaatggtggaactctggggaacatgccaatagttgaaacgtattttgaggaagcagacactgggaagaaatagaaaaagaagttggttaaaaataaagtattataagaactgagaaaagaaagaatttcatgaaggagtaggtgtcagtaatgtccaagaccagaagtcacatgagatactgactgactttgggaatttggaggtcacttacctgtagtagtttgggataggggaacatttccattggaatggtaatttgcatcctgccgttgccacttatttattctgtgacttgggaaagcccttttacctttgactcattgtctgtaaagaggaggttggcctctttaatggggttcagtctatgatccgtggagtgccagaggttcataaaaggtaccttcaggccctcccatcaagaaatcaagggtaaggccagatatttgttggggagggagggataaaagtcctctacccctgcttcaaacaaagcagtgagagcagcttgatttttatctgtctcatatatttggctttaatgtaagatttcattgaaagaaacacagtgcagtataagaaatctgacaactactggcgtacaggagcctaaagtaccttcaagctttaaaagctgtattattaacagcaggtgttgaaaggtcctatgctagatgaagatcatcatagatgctaacctattcatgatttggattttattcagaggtcaacattaatatctgagtttatataatgataactgtttgtattctcattaggaatgaaaatgtaacttctgaacaactgtattctactgtgtactttgttaaaaaaaaatctttttatgtgtcttaccaggttctgactcagaagatcttttggaagaattgctgtgctgtttgatgcagttgatcactgatattccactcttgtaagttctggctaggccaggatttgttttatcttctttgtatatggcagataatcattgatcatgttgagaagtttgtgggtccttgtatagaacttatatgtgtgccttttaaggattctatatccacagagttcttttctctctacctaatatttagactgactattcattgtcaaaacaaaaatgttacgttgttaaggggaaaacagtgaaactatattaagaatatggtaggcacagaattaatctctgtattaagagatcttatagatctttggaaacaagattttaagagagaagcagtttgaatctacttcatattgtggtagacacagtgagttgagttctccttatcttcctgacttcctgattgtatttccagcctcttttgaagccaggttttcgtttccagccttctttgaagctaggcatagtcagtgagatgtaggggaaggtcctccaatgaaacctctgggtaaagctctctaaaaggaactgattgagtcagctaggaggcacatctttttgatcttaacagccctttctcctgctgtctggaatgtggatagtcttttgagttgcatagccttcttggcaccatgaaccaagagacttacagaaaattctgttttgatgtcattgagctgctgaaccaaagccaacaactaccagtaccaccttttttcatcctggacttctcatgtgacagaaatagacccttatttgttaacactgctgtaactgggcttctgtcactgcagctcaatgcaattcctttgtgattcgaaatgttcatctcatttgttgcttttaaaaatttaaagtagagacagggcctcactatgttggccaggttggtctcgaactcccagcttcaagtgatcctcccacctcagcctcctaaagtgcctggattacaggtgtgagccaccgtgcctggcctcatttgttacttttaaagcagtgattctccacctttaaaaaaaagtattggccaggtgcagtgtctcacgcctgtaatcccagcactttgggagcctgaggcaggtgtattgtttggatgcaggagttggagaccagcctgggcaatatagtgagaccctgtctctacttaaaaaaaaaaaaaaaaaaattaggccggatgcagtggcttatgcctgtaatctcagcattttggaaggccaaggtgggcagttcatgaggtcaggagttcacgaccagcctggccaacatggtgaaaccccgtttctactaaaaatacaaaaactagctgggcgtggtggcgcatgcctgtaatcccagctactcaggaggctgatgcaggagaatcgtttggaccaaggtcgggaggcagaggttgcagtgagccgagatcacgccactgcactccagcctgggctacagagcgagactacgtcacaaaaaaaataaaaaattaaaaaattaaaaaaatatattgtccccctgagaagccttgtttgacatttctttgataattgcctctcccacttaatgaaatttgaatccccagacacactgaatatctgtttatgtcctgcagccctttggaggaccgcaaaccattattattgtatctatgaagatttttacttacctctgtggaaccaatttacatctcctgttgaaaatgcatatgtacaaggaattatttttgaaataaaaaagtagattttaatgtttctcatcacagaatctcagtctacatggagatataattggaaatgtgctatttgtctatggccccaaaaggaaagacaggtatttgtgagaaaataggctccaggctgctgtcgtacatgaatgcagcatctagaattttaatatagatttcgaagtgagaaccaccaacccctgtcgtgatatggcctggtggtatgcacccaggaaagtagggctgaggcagctgaagagtcattgcctagggaaggaaatgggacaatttcccattcaaccggagctcctgcagcagacacttgcatgacatcctttctccccttccattctaacagaactccagtattgtttagagtggtgctgtgtgcccagattagtttttcagacactttggcggttccatgtgaccatgtgacatagtttgggtcaagtatatgtgagcagaagtcatgaacttgcagagcatatccactctagccttttgctcattgccttctcttccttcctggaatgtggaggcaatgcttgggctgtcttgaaactatgttaatgagcattgcatgcaaagactagtgtcctgggagcatgggacattggtgacaatatgaaactattacattggccctggatcccatatctttgggtttcctcttacatgagaaaaatagatacctatcttgcttaggccactgtggttaggtttcttttacatgtggtcagatcagggaagggaaacacatatactgtgtactgtttctttgtcatggtatgtggagtgcttcatgtgttcctgatgtaattttaaaagtagcaccacctgcaattttttttctttttttttttgagatggatcttactctgtcacccaggctagagtgcagtggcgtgatctcagctcactgcaacctccgcctcctgggttgaagcgattctcctgcctcagcctcctgagtagctgggattacagacgagcgccaccacacccggctaatttttgtatttttagtagagatagggtttcaccatgttggttaggctggtcttgaactcctgacctgtgatctgcccgcctcggcctcccaaagttctgggattacaggcatgagccaccacgctcagccctaaatatattttttttttatataacacaataccaggaatttagtatatatcttaaatgagtacacgctttttttttttttttgcctttattgataaaatgttttggtgacattcagggtgatggaaacagtaaatacctttagatagtaaattggctccaaacacaatgaatagagcagccatttaaacactcttgaggagcaagccgattgtgttgtaatatatcaaacatttcagtgttttaatgtgtttataccttttaaattagctgaaaatgcacagctagccagttgtctcctattatgtacactcagctttaaccagctgctgaaacaatttctgatgatttaatgttcttggaactccatcctacaagaaggtttgtcttggtaacagtttccatgtgaaaccaaactactctttaaatgtttcatttcctctaactgtagtgcagtatttatggatcagtgtataatttaagaggaaataggaatatatgcaaaccacgaatgctctcacacctgaacatcatcagaagtgctataaacgtttcacatttcacattggtaattcatcctgtgctgcattagcaggtaaataacaagatgaaatgaattttaatggccactgagggtaattcaaactagcgtaaatgtttcttatgagacttttaaaatcattctgttaatattgagagcaaagggtttaccacggacacatacatgtgtatgctatatatttatttagagatctgtaaactaaaatgtaaatgataccttattataaagagaataggatcagtggcatacttgaaataaactcccagaagttcattacagtgatctttgtaggagttcatttgtaatgaagattcacttttaagtagttagtggctactgtttctcagacactttggatttcttgataaaatattaattcacggaggtactaatcttcattaaaattgttcatctttcaggagtccttccttaactccatagctctcagcatttatatatttaaaataaagattaagtcatgcacgggcttgacatttttcagtgtgtattggatcgatcccactagaatttaaataaatcggccaaaagcaaatccttgcctttgatttttataccttccctgtgtctcagtgaagtaaacaggaaagtaataaagataaaggtattttcctcaagacactaatatggagtgttctaacagaaagaacgtgggtaggtaagccagaggtaaaagcccagcgctcggaacttgtgacactgtctgggttcttgtagtgttactataagggctgaatgagacttgtgggaaccaaccgagtggtggagtcaggtgtggccatagccgcagaagcagtgatgccgtatagacccatccttgtattttggggctgcttgtgatgctgttttgttaagaaatggaagttattttgaggactcaaattagatttttttcccttgtctttgtttttgttgctgtcatttttcagcaaatctgtggctgttagttgtacatgaggatgtcagtgtcaagcacaggccccactccttctcactagtgccaccactctgggcaggtctgctcagagtaggcctctttctattggcctcagacccaaaatacagcctctttctctgggatccatttctgtggtctttcttatgaacctgtgaactcattgaggactgtttaatttttagtctggccctgatttgcagatttgtcaattataatttaatctaagaaaactttttgtagtttttttcgtaaggtatagattgataaagatgagagtttcataattaattgctttcactgcctttttcagggagtgtgtatctatttgtgtactgtgacttgtcgagtacaggggatatctgatgtcatctgctaaccctcactggtggtcttgctaatgtggagcatgccagtccatgctgtgtctagggcctttgccttctttccttctacagtttgtcttcctttagatatttgcatggctcacgttctgaccaccttcaagctttcatctgcttcacgttttgtttctttagaaatggccaccctgactaccctatagagtagctttgaccacctgaaaatagctgccctctcattctgtgtcttttttcatgtgttatttatttacttatttatttatttttttgagatgggattcccactctgtcacccagcctggagggcagtggcacaatcatggctcagtatagcctcaactgcccaggctcaagcaattctcccatctcagactcttgagtatctggggccacaggtgtgtgccaccatgcctggctaatttttaaaattatttttagagatgaggtcttgctgtgttgcccaggctggccttgaattctgggctcaagcaaccctcctgccttggcctcctaaagtgctgggattacaggcaagagccaccacacctggcctgttttttgtcttaacacttttcactactcttcatattacctgttacctctcttgctcatattttcccaataaaactagaatgaaacctccatgaaaacaagggctcttgtggcagcatttggtttgctcactgctgctgcatccatgatattcaggttagcttggcacatggtagactcaaatatttctttactgagtaaattagtaagggtctaacctgttcactgtgcttaaagcattttgtttgtttctcagcatctagtctatatggaaacagtattgtgctaaggcatattccactgcaagtgtaatggctcatttgtagttggcacattgtaacaacagggtgtcttactgacattggtagtagaaaggggctactggaagctgaaacactgagaaataacacctgagaatgtttaagggactagtagattaattagttataaatgctgagtattctggggccgtttagtttagggacgatgggctttatatctcagtagtccctagattattcttagtataataatttctttttaattcaggtcatcctcaaaaacatattgtgaatatactatgtgtgtacagtggagtagaccctgaacataaaaaggtgtgactcttgaagagcttagaggtagatagacaaaaagataccccgatgagaagaacattggtagatgccacagtcatttggagttgaacagattagcactggctaaatcattaaagaggcagaaaagaactggatagggacttcttaggtatgaataatgtatttggaaaatcacaagcacattaggttgagcagagggtttgtggaatattagggataaagaagcaatgttgatgtagcaaagactcaaatgttagaggactaaagatttgattatttttagggttctctgtttattgagatataaaaaagaatataattattagaaatatttttctaaaatccattttggaaatatttgagtgtgaaactgagaatcttatttataaaattcagcttatagcattttaaaaatgtaataacattatataagatgcacatttattggatccatagactaatagtactgggttagatgttctactgtggaaatttgagtactgaaaacatttggtagtaacagtgagtagatggttcaagaacctaaagagtcataaatggtttctttatggagtctccaagtcgttggaagagagtgaaggtacaggagagacccatggttggcaacgaagggcctagctattgggaaaatgcctttctacagccctgcatgttgatgctaaaatacttctttgaatctagccgtaaggtgggtggaggagtgagggtagggttggggggtgactacagcaagtcagtattttaagttttaggtgttgcaaggcaaacatccagtatagctttctgaatgaattaggcatttaaggcatcgattgaatcaaagaatcaaagattgtagtattttcagataccaagacagtattacgtattaagtttacagtagctttttagcttgaaaattgatgtctggtgccttcagagaatttttcctggtaaaaaaccaagattgttactgaatgctgctgttaattttgtttactttattaatacatgtatagcaaaataggaataaagtgatttgacattaataactgcaaattttaattctcccaacaaacaattgatttttttctttttaattttttctgacttataacttacttctttacagagtaatttcttttcagacataatccagattatattacatttgaatattttctggtagtcattgatgctgaattttaagtggtcatatatgtatgcacatggtttggagacaaaatcacattgcacagaggcttataatgagaacaaatgttatttgtctcatccctttttaaatgtttcctcctgagagacaaactttctaaattctcacctgttctagtggtttatataaacctttaccttcatttaaccttttatatttctaaataatataccattattttgaaaaaataagtctttatatttatttttttacatttagttttgagagtaattttaggttcaccacaaaattgagcagaaagtacagaattaaaaagaaaaaaaattagttgtttgttgggagaattaaaatttgcagttattaatgtcaagccacccccacacacatatagccttctgcaccgtcagtgtccctcagcagaggaatacatttgttataattaataaacctgcattggcactggattatcacccaaatatagtttacttcagtgttccctgtaggtgtaggtgtttatcttctatgggattagacaaatgcatgatgaaatgtatctatcagtgtatcatattgatcaatatatctattgtatctgtcaatgtgttgatcagtgtatcaattgtatctgtcaattgtatctatcagtgtatcaatgtatcatctatctatgtatcatctatctatcaatgtacctatcaattattgatagatacatctgtctatacattgatgtctatctatgatatctatgatagatatcaatgcatatctattgatatctatatctattgatatctatacattgatagatacatctatcaatgtatctataagtttattgatcagtgtatcaattgtatctatcaatgtatcaatgtgttgatcaatgtatctatcattgtcatgtacagagtagatcaaaggatgatggttaaagtatgtttaattttgtaagaaatttatattctatgggattagacaaatgcatgatgaaatgtatctatcattgtcatatcatacagagtagatcaaaggatgatggttaaaatatgtttaattttgtaagaaatttatattctatgggattagacaaatgcatgatgaaatgtatctatcattgtcatatcatacagagtagatgaatgaatgatggttaaagtatgtttaattttgtaagaaactgcttaactgtcttccaaaatgcctgtaccagttttgccattcccaccagtaatgaatgagagttcctattgctccacatccttgtcagcgtttggtggtgttagtgttttaaattttggcatttgaatagatgtgtagtggtatctcattgttttaatttgcagttccctaatgacatatgatgttgagcatctcttcatatgcttgtgccatctgtgtatcttttttgatgatatatctgttagtctttggtccactttttaattgggttgtgttcttgctgagttttgagagttctttgtatattttagataacaatccattatcagatatgtcttctgcaagtgttttctcccagcctgtggcatttcttctcattctcttcacagtgtctttcacagaatagaaatttttaattttaatgaggcccttgctctcagttatttttttgatggatcatgtctttcacagagtaggaaactttaaattttaaaattttaatcttcctatcaataatttctttcatggattgtgcctttggtgttgtatccaaaaagtcatcaccatacccaaggtcatttggattttctcctattttatcgttttagagttttatagttttgcatttcatatttagatctgtcttttttttgcatgtggatatccagttgtttcagcatctggttgaagagactacctttccccattatactgtctttgcttctttgtcaaagaccaattaactatatgtgggtctgtttctgagtgctcagttctgttctgttgatctatttattcttttgccagtgtcatgctgtcttgattactgtagccttgtagtaggtcttgaaggataattccagtccttttagtttgttctgctgtttcaattttgtgttgatatttataggccttttgcttttctgtataactttagaaccagtttgttgtgttactacaagttactaccaagtaacttgcaggtgttgtgatttgaattgtgttgcatctgtagatcacattaagaggaatcttgacaatattgagtctttctatccatgaatatagaatatctttctatttatttagttatttgatttctttcatcaaagttttatggttttgctcatacagcttttatacatattttgttagatttatatccaagtgttttattttcttggttcttaatgtaaatgtataccacttttttgattcattaaattatttattgacgtctgctcagatgattatctccttctacttgcaccttttcccttgctatattctattatatttaaattatcatttttagtttttctgtgtaatatatgtctttattccttcaaatataggcagtaacacttgactttccctttgtaaattaaagatactacttcccacacccttcattcagttctctttcttttctcttcttacttgtattatctgtactttaatatctacttattttaccccaggatgacaagtttacttaagtatattctttgtaggaagtacacaaaaggaagccaaagagcagggattagttgggttcaataaaaataatgagaagacagaactctccgtctcttaaagttttacgatgtattttaattgttttaaaatattactaatttctagatcagaagacatctaggtaaatcttgtaacatgattggagctaagttaggggatagataatctaaatgggagaagtgacttggaaatgtgtatattttctttgagtatatttattgttttgagaatttactttaaatcggctaatgaaactactctatgaagacctgactagggaggaatttggaaacttttttgtttctacattttggacctattttactccctcccaaaaatctgtcaggatgacagagtatcagaatttacagagaaagcaatatgtgtacttgtaatttgcagtagatatattgtatttcaataaagagtattgaaaagctttaaaaaaaaatcagaccctcccagtaatgtacttaggcacagggagagtttaataaagtaaatcactagatactgtcagttatttgggcatcaaactttgctaaataatccatagttgattccttaagagtcagcttcaactacaaaaatccactccagtatcacgggaggttttattttattttaaaagttaggtttattgatgtataatttacatttagcaaaattcatcttttctattgttcagttctatgagttttgacaaatgcatacagttacacacactgaaattataatgtagaacaattcaattacatccctctcaagttccctagtttcccttgtagtcagtctgtatcccaactcctcgtccctggcaaccacttggcaagaagtacagcgtgatctactttcccatgtaagtttttgtttttcttggaatttaatggcatttcttagctttttgtgttttttcctttattttagcttcacttttaaaaataaagctttattgagatagcattcatatgctacaaaattcagctttctaacttctacaattaattgattttagtatattcacaaaattgtacaaccatcaccattatctaataccggaacattttcagcaccccaggcagaagccatgtgcccattagcagtcactcttcatttctcagcccctagcaaaaccgacctactttgtgtttctatgggatttggctattctggacatttcatacaaattgtatcgtatcacatatggtcttttgtgtttgcattgttttacttagtatgttttcaaggttcattctagttatagcatggatcagtacttcattctttttttattattttagcctcatttttgaaagttctacgtgtagtcttgggactaccctcattgacaccatcagtcctctagcttcaatctagactggttgctttctagggctatcacatagctgtgtcatctgggattcctcttcactattttcttgggtggcctccatagttgcctgatattctttaaagccatttttggtttatttcctcagttttcatgtagcacattctcatgtagcttttgaagaaagtattagtccttacttgtctatatttgtatgtatttgtcttgtatgtctacctttgaatgataggtaggctagttatgagtttctgataatcagtattccctagagttttgaagatattccattattgtctaataatattattagtgttgttagagggaattctgatgccatctgattatcattgctctgtatggtttttttttttcttttcctcggtggaagattttagaatcttgggtttgtctttagaattctgaaatatggtgatgtgttagtgtggctgatattttttcattgatggaactgcttattagtcagtaaatatttgttcttcaactatgggcagttttttgtgttattcaatatttctttgtgcatttcttccctctttttaaatgtaatttttatttgtttatttatttagagacagagtctcgctctgttgcccagactggagtgcagtggcacaatcttgactcattgcaacctccacctcccgggttcaagcgatttccggctaatttttatatttttagtagagccagggtttcaccatgttggccaggctggtcttgagctcctgacctcaagtgttctgccctcttcagcctcccaaagtgctaggattacaggcgagagccaccgtacccggcccttccctctttttttaagtctctctaaaactcatgttcaagtcagatactggactttgtagatttaacctctcttatctcaactttttaagtctctctaaaactcatgttcaagtcagatactggactttgtagatttaacctctcttatctcaactttttacatcttttaaaaaaattctaacttgttggaaatttgtttgatttttagtttttgacctccctcatcaaaatttctgtactaaaatacttatttttaataggtaatatgtgtgcatggaaaaaatcagacggtatgaaagggaatataataagtcatcttctcactttggacccttactgtctaatcttctattccctctcccattcatagcataccgcataaaaagtgtttcttgtttttttttttttttctttttttttctttttttcttgagacggagtctcaccctgtcacccagggtggagtgcaatggtgagatcttggctcactgcaacctccgcctcccaggtttaaatgattctcctgcctcagcctcccaggtagctggaattacaggcgcccgccaccatgctcagtttagttttgtatttttagtagagatggggtttcaccaagttggccaggctggtctcaaactcctgacctcgtgatccgcccaccttggcctcccaaagtgctgggattacagacgtaagccactgcgctcagccaaaagtgtttttaaataaaaatgataccagccagacagactattctgtaagttgcttttatcacttttaacttgatttttcccaatcagtagctatagatcaactttgattttttatagctatgtatggattgtctgaatatatcataatttaatcagtatcttatgaaaatttagttcatttccagtcttttactattataaacaacactccaatgaatattcatgtacataaattcacttcatatatacagatatagccatcatatgtattttagagttggcattaattgtgcacattttaagttttgataaagatgtgataaatttggtaacaatttattccctaaaaagattataccaattatagtcccaccaaaagcctctagtagagccttgcaaacattgtacattataaaattttttgtaagttaaagattgaagtcatactgtgatccttttttaaatttttttgagacagggtctctgtcacccaggttggagtacagtggtgcgatcacggctcactgcaagctcgaattcctgggctcaagcaagccttcctcctccacttccctagtagctgggactacaggtgtgtgccaccatgcccagctaatttttaaaatttttagtagagatgaggtcttgctatgttacccaggctggtctcaaacttctggcctcaagcaatctttctgcctttgcctcccaaagttttgggatgacagattgagtcacggcgcctagttatattgtgattcttatgtgcatttgctcattgtaagtgaagttgaatatctcttaatatttttaaaagccatttctaacatttgatgaaattttacaattatttttagttccggagagttctttttctctgattattccatgttttatgagtgcaacattttgagttgacctaattgcactttggacatgtacttacccaccataaattctatacttgttacaattttggaatatttgctttatcattatatgtccatcttttcaatctgtcagtctatcttaatttttgtttttaagaatatttttaataactttttttgtgttgaactttaatttatttcaagaaaatttatggctatattttaaatatttgatgcattttttgcatatacagtatagtatttaagttaataaaagttcagtttttaatatttatggttttatgttttgtttgtttgtttgttttttgagacagtctcactctgtcacccaggcgggagtgcactggcacgatcttggctcactgcaacctccgcctcccaggttcaagcgattctcatgcctcagcctcaccagtagctgggattacaggcgcccaccaccatgctcggctagtttttatatttttagtagagacgggttttcaccatgttggccagcctggtcttgaactgctgtgctcaagtcatctgcccacttcggcctcccaaagtgctgagattataggcgtgagccactgcatctggtgtggttttttttttttttttggtgaggagtctcactctgttacccggctggagtgcaatggcgcgatcatggctcactgcaatctccacctcccgggttcgagtgattctcctgcctcagcctcccgagtagctgggattacaggtgtgcaccaccatgcccagctaatttttgtatttttagtagagacggggtttcaccatgttggccaggatgacctctatgtcttgacctcaggtaatccactcgccttggcctcccaaagtgctgggattacaggcgtgagccaccgcacttggcccatttttttttttttataaatcataaaaaaagtaatggatattttaatttgtgtgatccatccctttagtttatatatgatgaagttgataggtaatgtggtcgataacggtactgagtggcagttctgagactaaaatccacatttcttgaatcccaaatgccaagcactgtttcttctagtgttaagacttttataaatgaggagtattaccatgtctttgatttgttaatttttaaaactggccattatactaacatacttttgttgataatatctgtactatagcatattattttttagtctttccccatatttgactcctagaatctccatgttggcatgcattgatatttctaaattttggtctcaatcctttgaacttgtcagttgtttttattaaacttatgttccatttacagtaccatcaggtttcttatccaatagtaagtaaaaggaggatgtttttttcctctgtattcgttgactgctcttagccaacactaacacccatttcatgaagtcttttgtctttatccaagtgttccactgtgccctagcagtgcagtgcagggtcatggcgcctgtctctttttcttcacatgaaattaataacttgctccagcagtagtttgttctaggacatttccagagcagatggtggaaagttcttgggataatatggcagccaaagcagtattttggctttttaaggttgactttgttttggtgattgtgtaatgaaaatcttctgacattaaaacaagaaagatctgttgaattaaaacatttttcatcttctaaaaaccaccacactcagcatggtagaattttggtttctttcaagtattggcctctctggctctttttcctgattatttggcacttaagatagccaaattaatatatttttaattttgtcttcacagaaatgtaacattgcttttgaattcctttttaagagcattatagaaagttacgggaggaaatgccattagaggtcctcttgcacagtgtacttatttacaaataagaaaactgagacgcagagaagttatttgttgaggttaacagagcgagttaatagatgcttagaagcaggccctgactttcttcatttcgaatcggcgactcctgcagcatatactgcttgtgattagggtaacttcgtttttttctttgcttttatttcaatatgttatattttaatgaatagaagttcagtttttaatatttatggcagtcttctgtttttagttattaacttaatttttatatagatgatgcatttatattattcaaaaatccaacacataaaagtatgcatgaacaatctccctctcatccttgtctcccatctccctagtccttccattggcctccatagttaactgctattcttagtttcttacttgcccttataatttttcacaaatatagagatgacctacaacttaatgataatttgacttatgattttttgaatttacgattatgtgaaagcgataggcattcagtagaaactgtacttcaagtacctatacaactattttatttttcactttcagtacagtgttcaataaattacatgaaatattcaacactttattataaagtaggctttgtgttagatgactttgcccaactgtaggcttatttaagtattcatgcatgtttaaggtaagctaagctaagttataatataataggttagggtatttaaatgcatttttggcttttgatactttcaacttacagtagatttattgggacataactccattattagtcaaagagcatctgtatattcagttatgaatatagattcttatttcaccttgcttccacataaaaggcaggaaattctacatattgttttgaactttattctttttctagttaacattctatcctggcagttgttgtacactatatagaactttctcatttttattttttaaataacaacttcattgaggtatattttaaatactaaaattttcaccctttaaaaatatacagttcagtggtttgcagtatgttcacaaagttgtgaaaccaacaccactatctaattctagaacattttcattatccaaagagaaactgtgcacccatttgctaatgggcctgactacttcaggcctcatttatccctctcttctgcccctagtaaccactcatctgccttctgtctatgcatttccctattctggatattttatgcaagtgaaatcatacaatatatggcttttgtatctggcatttactttgtataatgtgttcagagttcattcatgttatataatatgtaccagtatttcattcttttttatgctgaaaagtatcccattgtctgtatataccacattttgcttattcaccagttgatatgcattgggtttatttttactttttggccattatgagtaatgctgctttgagcatcaatgtacaagattttgtgtagaaacgttttcagttcttctggctatgcatctaggaatggaattgctaagtgatatggtaactctgtatttaactttttgagttaactgccaaacttttccacagcagtttcaccactttaccttcctgccagccatgaaagagggtttcagtttctccacagcctttctcactcttcttcaaaagctatataatgttctgttgtagatcagtgtcaaaatatatttaatcatgcccttattgatggacattgttaatttgtttttgctcatatcctttgctcaggttgtattgccgcctctgttgtatctttctaaaaccctttctgtgttagaatgtaaatatttttttcagtttgcctgttgacttacttgcttataggatatttttgtttttatcatgatgactttttaacaattttgaataatttaaatttatccatcttttatagcttttaggcttaaggatctataagctgatttagttttacctttttaaacctcatctcttactactcttcttcttgcagattctattctagccctactggcctctttgttgttccttaaaggtactaggtgtattcctaccttagggactgcatgtggtactaggtgtattcctaccttagggactgcgtgtgctgggccctctacttggaagacacttcccttgccaccttgcttctttcaagtctttgcttaaatgtcaagtccttgttgaggtcttcttatttaaaattgtaacacacctgtgataggttgtcagtagtcccccaaatttatcttctttatttagagtttagctggacaacggctgtccaggtagagatgccatttatcaggattccctgcagctagatatggatgtaccagaagaagagatatatgcttttacattaaaaaaaaagaaatgacttgccttggagtgcattttttcccccttctctttggtgggaaattataacaactggcacaaactttgaagcacatgcaaagggtagtagagcttccctcccagcatgggccttgtgtattcttatcaagtggagcctacctgatctggattattttctggattatgatatggcagagaaattaactttgatcctgttttaaatacttgaactttagacctctttgtcacagcagcttagcctgttacttaaccttctaccctaacctggcactcttggtcctacctttatacccttacttttttcatagcacttatcttttaatttaatgtataacatatttatttatctgcccctctagatttaagctctgtgaagtttgtcttatagtagatacccaatgaatgattggaaagaccttcactaaagcatgttataaaggaattcttccatttctttttagatttaaacctttgatatatttgggatttatttttgtatagagtctgtggtatggattcaggtcttttttttttcccccaaaaggttatacagttgtcctactatatgtattaatgtccttttagaatgttactaatgaagtcctattactaacttacataaaaatgatttaaaaataagaaatgtctactcttcttcctgatagatttctcacgggagagataactgcagactcaatcatcatcagatcaaaaggagattttttttaaggcattaattcttgttttctctaaatcttgtatttttattcgtattaagtggtgtgttgacatgtgacatctcttgttctttggcttgtagttacaggctattttgtaaacaatcaagaataacaaagtccaaagtcttgagttatgaatatgagttagccaagcagtttggaggcagaaggggaagttgaagccatcacagagacttaggagatgtgagggaacgtggtaacgaggaagcagtagttgatggatagttgcattttgcccacatgtttctttaaaatgtatttcttaaatggctgttccagggtttttctgtttacatcattttttccccagatatgtagaacccaaatttgggttccttatttttaaactgacttttgaaaaacatcagtcatcttcaataccatttattacagaaaatggattaaatgaaggcatgggctactttgagtaagtcttgtttcaaatgaatgttgagtaattatttttgttgttactactagttctgttactgtggctccaggagtctagtgattttttttttttttttaatgtggtgtagaggtggggtcttgtatgttgcccaagcctgtcctgaactcctggcctcaagtgatcctcctgcctcagtctcctaacgtgctgggattacaggcatgaaccagtatgcccaggcataaatttttctgcagagtgttaaatcataaaaaagtgtttagaagctgggagtttcagatatttttcatcatttaaaatttgtacacgaatggatgtatttttcttggttttggtaaaatagtattaatttctcactgtgcctgtgagcatagttgaagagactattcaaaaatatgtgagtattcactggttgtcagtccttgttttaggtgctagggatacaatactgaataagatataaattctagttgcgagtgggataggacagacaataaacacattaatatgtaatgttaggatgtgataagggcaatgaaagaaatagtaatgtgatggtattttagccaagatcataagggagggcttcttgtgaagtggaccttataataaagtcaaagacagagtcctgttactgtttgatgggagagtattctaacagagggaacagcagcttcaaggccttgaggcggtcacatgcttggtatatccaaggacactaagcaagccagtagagctgagcagaatgagcaaggatggggagggtatgtggtagaagataagttagtatggatgcagaagtcatacagggtcttagaggctgagttaaggactccgagttttattcttagtggggtgggcagctgtgggatggtgattatccttgtctgaatatttttgccctgtgtatttaaattttcccttgctttgtggttataagaactatcctcagacaacaaaaattggaaattaggttcttgacatctttgcccaccttctccccacaaaatcattctgttctcgctatttttaatatttatacctttgctaccatttgaagctgtgcttcattgtgtatacagttatgcattgcttaatgatggggatattgtgagaaatacattgttgggtgatttcatcattgtgcaaacatcatagagtgtacttacataaacctagatgttatagcctgctacacacctaccctgaatagtataacctgttgctcctaggctacaaacctgtatagcatgttactgcactaaatactataggcagttgtaacacagtgtaagtatgtatctacacatatctaaacatagaaagggtacattaaaatatggcattataatatggaagcattatcatatatgtggtccattgttgactgacatactgttatgggacccatgactatatttttattatcctcacctcccctcctaatctggcagatagtataacaatgagtaatatttttatgctggctggtaggcaaatttttggttcttactgaaattagcacataatctgattcttactgagtgctagtgataggcagactaatgccattccaaaccccaaagatgtacatgctctaatccctggaacctgtgagtaacataacttatatgtcaaaagtgatgttgtagatgtgtttaaagttaaagaccttttaatggagagactgtcattcattatcctgtcgggcccagtctaatcacatgagtccttaaatgagcaaagcagagtgggtcagagagatgtgatataaggagtcactcaaagtccttgcttccttcgaagatggaacaagagatccatgggccaagggatgtggtgacccctagaagccaagaattgccctcagtttacacccagcaagaaaacagggacctgggtcctacaaccacgaggaaatgagtcctgccaaaaacccaaatgaacaggaaatgaattcttctttagagcctccagaatggaatgcagcttgccgacacctggattttaggctcgtgagacctgtactggacttctgactcccaggactgtatgataacaaatggtgctgtttaaagctgctacatttgtgatgatttgttaatggcagcaatgtaaaactaatacagtgctgatagaacatattcagcttctcaaagcagacacctttagcaaattagatttaagtacagtattttcaatggttcattcattctaatatttgttaaatacctactattttctgggaactgtgggaggagctaggaataagaaaggctcctgacttccccaaactcatggtctacagtcacttcataaatagtcaattttttaatttatatttttgaatttatggaaaatttcaagcatataaatatagagagaagaatgaaactccatgtgcttgtcactcagcttcagtaactatcaactcatggccactcttctttcatgaataccccatccacatccaccctcagtgacacaaaggaaatacagaccttgctttttattttatcattttatcattttttttttttttttttttttttgcgatggagtctcactctgtagcccaggctagaatgcagtggtgcgatctcagcttactgcaacctccacctcccaggttcaagcgattcccctgcctcagcttcctgagtagctgggactacaggtgcctgccaccatgcccggctaattttttgtatttttagtagtttcacggggtttcaccgtgttagccaggatggtctcgatctcctgacctcgtgatccacccgcctcggcctcccaaagtgctgggattacaggcatgagccaccacatccagcctttatcatctttgtcatagtataatttatctgtgaattcatttggaattttttactttctattttttgtcatgaaatttggtctaggatttttttggtgcaagttagaaaattaatgtagattagttcagttagcagaagtgctgcaatagtgatttgggggttacaaataaattttagtgaataggtgattttacaaatacagaatctgtgaataatgagtgttgactgtatatatggcaattttccatttcctgtgtccttgatttagttaatggcatcaccatctctgggtgctacatttagaaagcttagtgtttcttgattaatctgtttttcttacccattttaagtgtctgatctgtcactgagtggtagtagttttattttattaaatgttattcaaatctgattgctttttcattcatgttgtcactgttttagtggatgtcctcattatgtccccccaaatgatttattgcacatgtcttttgtttcctggattagtttaaacattttctcacatcagtatgttccccatcctcttatgtgtcctttcatcccacaagccctggttttagactcatcagacatagggttgaatttggctatgtgtcacattctttagcactattatcatcagctcctgtaaggcctgtcctttcctccatttagtattcatccattcatttattctcttttatctccattccctatttccttttctttcccatagatagccattctgatgtgtttaatatgtttacttctacatatatatgttcaggtacaaaatgttattcgtatgtgtacatgtatttttaatgtatgtaaatagaattgtgttatagaactcattctgtttttttttacttttttcctctcaaaactgtttttaagagttacttgtgatgcaaagtgaacatttagtctgtggcttttaaaacttctccacgtgggccgggtgcagtggctcacgcttgtaatcccagcactttggtaggccgaggcgggcggatcacgagatcaggagatcgagaccatcctggctaacacagtgaaaccccgtctctactaaaaatacagaaaaattagctgggcgtggtggcgggtgcctgtagttcacagctactcgagaggctgaggcaggagaacggcgtgaatccaggaggcggagcttgcagtgagccgagatggcgccactgcactccagcctgggcgacagagcgagactctgtctcaaaaacaaacaaacaaacaaacaaacaaaaaaccccaaaaaaacccaaaacctgctccatgtgtggctccgcctcattttacttatttaattcatcggttatacccggattgcctccaactttgcatgcccacaaataatggatgtttcgtgttgttcatctattgctgcataaaaattacccaaaacttagctgtttagaacaacaaatattattacatagttttttagggtcagagatctgagtataccgtagctttaagactctgactcaaggtgtcacatgaagttgtagtcaagctggggctctggtctcacttgaagcctcagctgggggacgccttgcttcctaggtctcttggctattggcaagagtcagctcctcaagggttggactgaggacctcagttcctcactggctgttgattggaggcctcccttagttctttgccgtgtagacctctcagtatgttagcctacagcaaggcaactggccggcaaatggaagagcaagaggggctactcaacacacatcgtagttatgttgtaagctgatctctcaaaagtgacataactctcacttttgttgtattctgtgaggggaggggattacacaagggcatgaatagcaggaagcaggcatgattggggtcattttagaggatgcctactatatttctcagacatatctctgtggatttttctttggcacgtgcgcatgcacgcgtgtgtgtctgtgtgtctgtgtgaatggacataggttctctaaaactgactatgctggttagtattcccatcagcagagcatgagggtttttatatcaccacatgcctggcaacacattacattctctagggcataggggcatatcaccttgtttcagattgcctgtttatatcttttgattttttttttctagcagagttcctgcctttttattggttgtttgcaggagttatttgtaatagccttgatattagtttcgtgttcttctttcagtctattatctgcctgttaactttgtccagggattcatttgctgagcagtaatctttaattctgatgtaatttaatgtgtaatttttgcctttgtggtttgtgttcttaggcttttatttaataagtcctttcttgtgcttatgttacaaacttattgtactcttccttctatcaactttagttttattcacatctaagtcattaagtcttctgtagtaggtcttgagtatgttgtaaggtgtagggatctgtcattatgaaataaaagaggtgtttcccattaccatcttctgtacaatgtgtttttcttcattgatttgtggagtaatcgtaatctttattgtatattatttccatatatacacaggtctgtctttgaattatcaattggggtcctttggtttgtttactttttatacaaataccatgctgtttttcttactacagctgtatagagtggcttgatatccagtagggaaagtgcccctcttcattctttattgtcaaggttgacttggctatttgtttattatttcataaaagtgagtcaatttatgcagttcctcaaaaaagtcgagtgagaattttggttgtgattcgttgactttctgtattaatctgggtagaattattatcttcatagtattgtcattctgttcagatcatccactgtgtcctttttaaatgtttttcttcatagatgtcctatgaaggaccaaaacattttattccaaacattttagttattctggcagtcttgcaaaatgctgttttgtttttgataacctactattgttggttagtgctgctaaggagaaatgctatttatctttcaaagttgatcttgtatctggcctagttggatttttaaatttatttgaatagtttcttgattttttaataactgttttaatctaacttctccaatatatacatactttttccattttattaatttctcaactcccagttcgagtccctttgctcccacccctttcccccaccttcttttaatctgtttgatcgatattgaatttcttattttccttcaaaactaccagacctttttgtggctgcctttgtatggtttcttcactttaatgcccttccccttcttcttgttcttcgtctgctcaaatatcatcatctttgtgaagaatttcccttctgacccaggcagaattggttgctgttatctctgtgttcctaatacagatagttcatattctttcatgggatttgccggatttcatagtaatttctttttctatgtttgattattccgctgactcttcactaggactcctctctttcttctctcctttttgctccttccccctcaatctcttgtcactgctgtgatgttctcaatctcttgtcactgctgtgattggctatgttctcaggcaggatccatcgacagagaaaaccagtagcagctctatccatacatagttcttagcactcacaatctcagaaggagagagtgcctcttttctgatagttccagaagtgctgggaaggattttgacaaggaccatttttattggccaaacgtggatcaccagaaggcagagtcgtgccccatccaatccacatgtatggaggggagggaggttctcaggaggacaaaagggctgcttttgccagaagaacaggaggtggatgttggtcaggcaaaatcaacagaggacagctgtaagccagtcaacaacattctggatccttctttcatgaaattccctttacatttttgttgcaatgagtattccatttgtgcttatgaatacatattacctgacctcagcattcttcttcctctttgctatcctaagttatatatgccttgtacgctttgctgatggatctattaaggaaggtattcaataagtttccagtcaaaatgaaaacagtaaagatccctccatctttccatttatttatccattgagtacctattatatactagagttgagaatataaacaacagcaaaaatgaaaggttctctagctagagtctcatatattatagtaagaaagatttgtaagtaattgccactcatactccaggttttaaatgccactttttaagagacgctttcttttgatcccatagttactatcagagtgtcctgtaatcctctcctgttattacttgtttttttcctttatagtcctttttggagtgattattatttgatttttcttttttccactaaattgtaagcttcataaaggcaggagccttgtctatttgttgatggatatgtccccaatatgtagcataatgcctgtctagagatagtaagaataaatttttaatcaatatttgttgaacatcatatgagcaaaaatactgtgtgataagcaatttgatataatttgtttctctgggcctacggaagacacacatggttctgtttaggaatttggggaaatgggtttttagcttgcagtgactcttattgtcatgttgtattgcttcagtattcttatgtgctggaagctttccttacctcccagcatcaaaccctctactcttcattcttctacatttataggattccacggtaagagaggatgatccaaggttaacactttttttgttctctcacttctgattgtgtttggcccaattaattttgaaggagaagaacacttttttctaaatacgtattctttccctaaggttattagacctagtaattattaatagtcatagattttggtttaagcaaaactaaaacaatttagtaaaacaatttgtttctagatctgaggcatacagtaagatgttaaattgtaaaccaccacagctgattctttattattgatgcaatgacaaaatacatttgcagtctggcacgatggctcatgcctgtaatcccagcagtttgggagccccaggcaggcagatcacttgagcacaggagttccagatcagcctgggcaacatggtaaaaccccctctttgtaaaaaagacaaaaattagctgggcatgatggcgtctgcctgtagtcccagctacttgagaggctaaggcaggaggatcacttgagcctgggaggtggaggttgcagtgagccaagatcgcgccactaggtgtcagcctaggtgacagacacagaccctgtctccaaaaagaaaaaaaaaaaagacagaaaacgtttgcaaatgtattggacatagtcatccatctgcctatctaaataggctctaactcacagccaagtatttgttatgtcaggatttggctttaaactctgacccaggtgaaaagcctagccaggagactattgtgtatggattccagacaggcgtgggctatgttttgaatgaatgattattgtgatacaaaatttttgggggttctgagcacccaaatcaaatcatcattagtaaatcataacatgacatgaaacatcaagtttgtctttcattcaattcatgaaagaagaacaaatacaagaattgctttattttattttttaaattttttatttttattttttgagacaagagtctcactctgttgcccaggctggagtgcagtggtgtaatctcagctcactgcaacctccaccttctgggttctagtgcctcagcctcctgagtagctgggattacaggcatgtgccactatgcccaagaattgctttttacaggttaatttttacaacagtgattatggaaatttcaggaaagagattgttctacaatactttaaaagtcagatttctgagtagagctgagctttattcaaccacgtaataaggctaattgcgtgggtctcttgtgtttttctttttttatatgtcatttttaaatatatttctttttctttctttattttttgtttttgagatggagtttcgctcttatcgccaaggctggagtgcaatggcacgatcttggctcactgcaacttccgcctcccaggttcaagccattctcctgcctcagcctccctagtagctggcattacaggtgcccgccaccatgcccagctaattttttgtatttttagcagagatggggttttaccatgttggccaggctggtctcaaactcctgacctcaggtgatccacccgctttggcctcccaaagtgctgggattacaggcgtgagccactgagcctggccttttaaacatatttctatcagtaataactccttaagatatctggtagaatttaaatttttctagttctagaatcaagtcatcattaatttgtttaatgagctttcatttaagtaggtgttaagtatttttctttgtttttcataattatttcatttttataaaaatattttagtattcttttggtgctattgctctttttactgcgttgttgaggtttctacttccttggtcttaacatgttccccattataatcctgtttaaacttttgcagtaactggaaatttctggatgcctttattcctctgtgtgctttctgttcagctgaatctttttctttttatttgatctaagacttgtttcccaaaggggtttatgatcttgagaggacagagtaacccttcataatcaaaatatgcttaataaaacaggaataacttgtttactgttaatattttgctgaacatgcaaagttgaccttgagaaaggtaggcactagagacacaagatctagggtgtattattgttctgattgtaaagtgatcatcaacgtgaaaaggcattgttttcttccctacactgtaccttctcttcagctttacaatctgagtatttgtctctgtattatcactaaacagaaatgaacatagatgtctagagtgaatcttcaaaacagaacactgctagtaactatttccattatacataaatagacttgtcatttaataggagatggaaactggaaaatagggaaataaagggataactaacccaaatacaccagctaatgacagggaaggagtttaatatttttgcttgacttaatttttgtattaaacgtattaacatttttcagtaacctgaaaatactgaatatttagatttgagtttttaaatgtatagttcatttagaaaagaatagtgtcttaatcttccaaagtgactgttactctgtttttcttccattttagagatattacatatgaaatatcagtagaagctatatcaacaatggttgttttcctttcctgccaactcttccacaaagaagttttgcgacagagcatcagccacaagtatttgatgcgaggtccatggtatgtttctactttaagtatgtctagttttttcattgtataaatctatatttctagtcttgtccttttacctgagtatcgtcccatatctccaaccaggtatttcctctagttgttctattgtctctttaaacccagtgcatagggaaccgcattctactttcctgtgccatctacccatcctccctgttcttcctgtcccgtagcttcattaccttctccagtggttgcttcgtagaattgaaactttgaaatcatctttttcttccatctccttcattctgtctatgtttaagcagtcaagtcatatttgttattcagattatttttgtatcttcctcttctcagcagtccctttgaaacacctgtgatctatgcccccttactctctttggacttctccagcagcctcttcgctgactattcctacttctttgagcctgcaaatatttgctgtgtgctatccatgtgccaggcatgttagactgtggggctatgctcttgagcagaagcttacgatctcctagagggtgtggatgcaaatgaccaacacatatgcacatacctgaccttgtattaacataatcttcacaaaactttaaaaatgtaaaacaaatccaaataaagtacctttgaggaaagttctcagatagtggggagctttgtcttcttcatattctttttgctaccctgattattcctgtggcatgtatgttctttgaacatatttgaaaatcactgagggaaaggatctgggctttggagtcagaggtttgcattggaaccctctctgacagagacactcagaatgacactcagaatgaccgtggtttgaagtagtgctggcatcgtgggactgtgtgcatctttgctgaaacaagattgtgaacttcatcccttatagtgccagagtattcaagttgctttttaaaaatagacatagagggtgttagtgttcttattttctaagtaaggtttttatagtatcattatggtgccacatatttaaaccgtaatatgttctttacttatttttggggttcatcttggaaaccatatttaaaaagctcaatagtacattaaagaatctgttaaaaagtttactctagattgcaggaattagtttaataccaattgaataattgaataatttcatacttaaaaagtgtagtcctattgttatttttaaattcttgcttttttctactgattctttattactacttcccttcaattgccagataatgtgttatgcactaaatttataatagctcacagtgttataccgaatgtagataaagtaactggagttcaagagttcaagtgggctgggcacggtggctcacgcctgtaatctcagcactttgggaggccgaagcgggaggatcgcttgagtttaggagtttgagaccagcctgggcaacatagtgagaccttgtctctaccagaccttgtttctccccactgcagaaaaaaagtatttaagtaatttgatcaatatcttatgatgtgataagaggaaaagcaaggattaagcctcaaaattgctctcaaagcccatggtcttcactgttgtgtgcagtgctcaatttctgtgagttgtgccaatagcccttttgtattaacagatagtgttaatggcagaattatttctgtattgttattcagaattagatgactcccataaatatgagtttgatttttttttcctttttgtatagtcttccatacaccagcaaacttgtgaagaccttattatataactttatcagacaagaaaagccacctcctccaggggcccatgttttccctcagcagtcggatgggggaggactgctttatggacttgcatcaggagtagcaagtaagttttatcagattttttcaattctttggtgcacataaattttatctatttaggcataagaaattctgtttgcttggctgccaccattaatagttacattgaatttgtgcagctggttcaatgtgaaaacaaagtaattaaaatattaatctttctgttttgtgcggtgatttatgtaaaatgtatgcaaataatgaatggattacctacaaaacatcgtttttcaggaagaatgtttacacataaatatgcgtattgcatgaattgtagctgtatagtaaaaataaaattaagcatttgaaaacttataacactacttgtattataagaggaaatctattttaggttattttagggtatattttggttaggatttcatgtgactaattaggtgcagttttcctattacactaagtgctttcttcagtgacaactgaatattttgcagaattttgtaataagctgtgaaatggcacaaacttgagttttgtttgattgggtgcagatttcttaagtgaagaaagctcttccctaccttacaataagtcctcatttctgcttcacttcacagtattcagactacagacactagaagtaagagagtagttctggtggagggcctgggtcatgtgaagttatataaatgaaacttcctagagcgacactttggtacttgtgaggtcggcctgggagttccttactcctcccaaacctgcagcatgtcctctccttaatcacgcaggacagagtcaaatggaacacatttccacagctgcattatggctgtggcgtgctctacactccagctggacatcagtttgatatgaaaaggtagcactgtgataacttactagtgttgggagcttctttggattcagagacctcttcaaaaagcagtagacttggtctgttaattgacagaaatcagtgaaccagactttcttagatttgccttcctttgatttcttttaatattatgaattgagtcacacttgtgatcacttctgcctttggtgctgagcagcctgccaagagtgccacacctgcatagattctttgagttactcctatccagtttcctcattatttcaggggctttttgtgtcccattggaaggcttaattgatctattactgttttcttttttaaaaatcattaaactggtataagtatttaaaagctgaatatttcccaatattccaatatggttagaggtttttttggggtggcagagatagtataagcctgtaagtgctttcttcaaaacaatggcaatacttggcagttttttaaaaaagtaaacatggatttgtgtatggtttttgggttttctttcagttatgtatcatatcaaagggaacccagtattgcatgtggtatcattagtgtgccaggtgccaaaaaacatgaatttaactttagatcttttcctaactagatagcaggaaggaagccccttaattttcctagctctcagtttccttgtctatctaattagaaggtgggttgagatggtgatttctgagattattactacataattttctatggtcttttttttctcacggttttaaaatttaatattcagttaagtgcattaaaatagatttatggtttttagtgtgctatatagtcacaagacattttacacagctttcttcctaaatctttataaaactattcatgtaaaagtataaatcaagatggagtaattatggattcattatttcatgatatgtgtgactcaaaggattataaaaaaacaacaaaaggacattctcctaaaaagcacagctacgttctctgggcaaaatgaaatgtaaaaacgatcacagtcatgtaattttaagttaatccacattccaggaaagtcaatcaagttgccaggatttgacttaagttgtgtgatcacttctgatgatcttttggttggtagttaaagaattctcttactttactattggcttgagaaaatatgatttggaagttcctcactgaaaaaaattatattccaaagccaaatgtaaattataaactcatttggattatattcatttttgttgggattgaagttttcctggatatagcaagcatttcttttcatagcagtgtgtgcattgtatgtgttgcttacattatttcctttgaaacagagtgccttgttgtagaaaaccttacagttccggagtgaaatttgttgtcactgacagggcaggaggagaatccttgtactggaactgcggctggatgagtagtgaaccacttgcttggaccctcctatgagtcaggcaaggccttctgcagtttcttctcatttacttttacagatgtgtttttggttatccttttgtttgtttctgagactctgtgaaagagtctgttactttgttgcaccctgatactctccttttgctttcttctttttttaaattatactttttctagggtacatgtgcacaacgtgcaggtttgttacatatgtatatatgtgccatgttggtttgctgcacctgttaactcgtcatttacattaggtatttctcctaatgctatccctcccccctcccccccaccccacaacaggccccagtgtgtgatgttccctgccctgtgtccaagagttctcattattcagttcccagctatgagtgagaacatgcggtgtttggttttctgtccttgaaatagtttgctcagaatgatggtttccagcttcatccatgtccctgcaaaggacatgaactcatccttttttatggctgcagagtattccatggtgtatatgtgccacattttcttaatccagtctatcactgatggacatttgggttagttccaagtctttgctattgtgaatagttgccacaataaacatatgtgtgtgtgtgtctttatagtagcatgatttataatcctttgggtatatatccagtaatgggatggctgggtcaaatgttgtttctagttctagaaccctgaggaatcgccacactgtcttccacaatggttgaactagtttacagtcccaccaacagtgtaaaagtgttcctatttctccacatcctctccagcacctgttgtttcctgacttttcaatgattgccattctaactggtatgagatggtatctcattgtggttttgatttgcatttctctgctgaccagtgatgataagcattttttcatgtgtctgttggctgcataaatgtcttttgagaagtgtctattcatatcctttgcccactttttgatggggttgtttgattttttttcttgtaaatttgtttaagttctttgtagattgtggatattagccctttgtcagatgagtagactacaaaaattttctcccattctgtaggttgtctgttcactctgatggtagtttcttttgctgtgcagatgctctcttttttcatgccttcactaggatagaacagttgcttggagtcctccttacttctctctctggctctttattttctgcccattcatccattaaggaccgtcttgagttccaccttctccatgaagaacttcctttgctctcctggctagatgcgatcttttcctctaacgctttaccactataccactctgctttgtagtaacttatgtacatgcatcattctccctgtgttggctccacatacaataaaatgagaactaatgtttatataatatgagtttacagtgccacgttttgagcatctcatttattctcataataggctcatctatcagaaatagttggttttaattttttaatgatggatgaagagattttcctggttagtatgttattttgtctaagattacataggaaatagatgatgttggctcgttaatttaagctcagttcatcagacccctgagcctttgctgtttttgccttttgttcttgtgatcacccaagtcctgagggcataagctccttgacttgtgtgggtgtcccctgcagtatccagcagagcgccatccaacatctgtggactgtagtgaatactggtgtgcaattaaatgccaaaagctcatactcaagatagatgtgaactcagttgtaagaatgatgtctgtcatttgctgaatgccttctgtttgccaggcactgtggtagctactttacatacctgatttcatttattctttatttttcttttctaacattttattacagaaaatttcaaagatgtatagagtagatgccaggtgcagtggctcatgtccgtaatcccagtgctttgggaggctgacgtgggtggatcgcttgagctcaggagtttgagaacagcctgggcagcatagtgagacaccacctctataaaaaacacaaaaattagctggacgtggtggtgcgcgcctgcagaccccgctacttaggagtctgaagtgggtagttcgcttgagcctggaaggtcgaggctgcagtgtgctgtgatcacgccaccgcactccagcctgagtgacagactttgtctcaacaacaaaaaaacaaaaacaaaacaaaaccctaaagatatacacagtagagagaatggtagaatgaactcccatctacccacaacccctgctcaagaatgatcaacaatctttttttcccatttatctgcattctcctacttaaaaaaaaattttattttgaaataagttcacacatatagaaaagtccccaaaataaaaatatcacaaaaaactatatgtaactttatccagattgatttattgttaacattttatcccatttgttgtgttttttctcctcttctgtctcattctgtactttcttctctctctctccccctttctctttctctccccccaccacacacacacacacacacacacacacacacacacacggttttttaaaatcatttgaggataagttacatgcatcgtaatatccctttactcctaaatactttaatgtgtatttcctgaaagaggatatggcttatgctaccacagtatacttaccagcttcagtaaatttagcatccaactgtccttaaaagccatttgcttctacgtcaataaaaataagaaaatggatattttcctctgtattttaaagtctcctttattgagtatagcgttatttgtatttcacttaagttgaatttttacaattaggtattcttgtaaccactctgctatcaatttatctatcttacactaaaagccccatgaggcaggatccacctctcttccttctgtttattattggcactgcagtactcagtgagtgcttggttggcattcaatcagaatgtaataaataactggaagaattactaataccttttaattaccactagtaagtttttaaaattagtgtaatagaaattaacttatagattttaggttttttttttttaagcttttcaaatgtgtcaagtgtggtttacttcagtcactggaagtggttagaatgaattatatattaatatatttatcttgtgttatatctatgctaggtgcaagcaaagctgtattagtaattttccagtacaagaaaaaattgtttcctttctgtttagtttaactattcttctaatatgctgacaaaatggaaaaagaattaattgatatattactttactaattagaagagggtgttgcagttttaattaatttggtatttttaaatgaactttttactgaatcatagaattccagaaccacctggcatacttaaaaaaaaatatgtgttgtagttagaacttggagtttctgattcattagacatgaggtgggacctggtaattcgcaccttcagtaattattctaggtgattctgatgtatccgagtcatttcagcaccgctgatgaatgcatcctcctttccagttcctgaatctcttctgctgtgggcctttcatggcatgtggttgagccagtactactaactactgaggaaatgtgttgtttcgaggcagcttatggtggatttaatggacccctcctcgtgtattcccttggtttctgttcttagtgtgctctgttgctgatgaggtccagttttcaggataaatctgacaatgagtgcagtactctaacatggaataaataaattggaactctaacttccctgattctggactctacgtttaaaaaaataaatctaaatgcacactaactcttttggtgctaatatcagttattaataaattttttgcctattttatcatctaagccttttccagatctgtagtttttatgtgctatcttcctttttcaaactttatatataaaggtatggctctctgtgtagctcagtgagattcaattttgttaggtgtgtggcccataattacagccaagatttgctcttattttcagctgcagatgatcattaaacctatattttggggctttttgcttttcttcaggattgtgtccttggtaccatattgagagaggagtagcacattttaattcttgtgtggagagcagagtgtttctgtagctgtcacgtgtaaaataacaacaaaagtgaatgtaactagggattttttgactgttttttatagaatagatttcatttgctggaagcctggtaaggatttgctgtgaggtcagtcgcctgggttttccaggcagcagactttagagttaataaggaacaaggattcctatagtttcccctgtgttttaggacttacccacaggaatctttgcaaaactggagctagtagtacacctggtggtgggaggtgcctgggagcctcttaggggttcaaatccccccaatatctcaccctggattattattatcccgggacctctcagatgccttttctcatctcccactcctggacatcctggtggctaagggtgggttctagagcctgataatcagaatcagaagatttgggatagagtcatagctcagcatgaccttaccaagttctccagcatttaaaatctcattaccttatgtgtaatgctgataaatatgagaccatttgaacagagttattgtgaggaataagtgagatattatatacaaaatagaaaattatacaacatctattcccatgtaaataactgtttttgttttctgccctgaagctgtgctggtgcttattagttaaaatagaaagaaagaaaataaatttaattagaacaacagctaatgatcagaaaatcctggacaaatttatataagacaatttaaaaatttaagaactttgaatctttttggtctgctcaaatttgaaatttatgttaaaaatatttttgaaaaactgacaaaagtgaatatgccagccatgttttctccaactggcttttcattttatgtggtgcaaaatttggccaataacagttaaaaaaggaaaatttgattgttaaacagatattgcccacaagagatttctccttgcttcctaagtgaacttgccttgacaacaatcactatggtaccatttcttattgactaatttatctaaaaggttattatatttgccttgacagtttgtttataaaatttgccaattaaagattttcataaagaaaatatttgatgcagactcaactggaattacaataaatatttcaaatgtttcaaactaatcaatgatatcagtattatgggtagccttaagtatagtcagtacggcagttaatagttaattctttctttaatctacgagcacatcaccctgccgtgttaaagattttttttttttttttttttttttttttttttttgagacagagcctatctggctctgtcactcaggctggagtgcagtgacatgatgtaagctcactgcaacctccgcctcccaggctcaagcgattgtcgtgcctcagctgcctgagtagctgggattataggcacctgccaccattcctaattttttatgtttttacttgagacatgatttcaccatgttggccaggctggtcttgaactcctgacctcaagtgatctgcccgccttggcgctggaattacaggcatcagccatcatgcccatccgttaaagatgttttataaagcaaatgactgaagacccttacttccataatttgttatgttatgggacaggatgttagatggtaaagtattgtcttagcttgggctaatgtaacaaaataccgtaggctgggtgtcttgaacaacagaaatgtatttctcacagttctggaggctgggaagtcagagatccaggtgccaggagattcacttcttggtgtagaaccctattcctgacttgcagatgtccaccttcttgctgtgtcctcacagggcagagaaaggaagctctggtcttttcttttgagggcactaagcccatcatgggggctccactctcacgatctcatctaagcctaatcaccttccaaagctccaccttctaatcccttcacattgagacctgtggcttcaagataggaattttgagggtgacacaaaaattcagtccataccaggtattaagtagcttgtgctggaatgctcctcactgaaattctcaatttggaaggctactgatctcttctgcatgttggcatctaaggtacctttcagctctagtcattatcttaaaccacagctctgcttagtggtgttggtgaggactgtggccaaagtggatcactcactacccattctaaccctgctaacttgtttttttgttatgttttgtttttgttttttaaaaaacaaaaaacaaaacaaaacaggccaaaatgtgtaaggagcccctcagaaaacaattctgtgattgaaacacgttattctcttttctaattttgagggccaccacttacattgtcctttggaggatctagctatgggttacaataatttggtattacagaagagggacgtactggactgtagatgtttgtgttaggtagacctggaattgaatgccaaacctgctatttattaactgagtgttcttgggctattaacctttcaataacttaaattcctcacaataaaatgagaataataccttcctttgtggggctgctgagatcaaatgagcaaatgtgtaggaaaaagactggtatcttggaagtatacaataaatggtcactattagtatcagatattattacctggtaatatttaaaatataacttttgttttaaaaatactgaaaaataaaggccttatgatttccaagtttattcagatttttaatgtaaataaattatgaaaattatcagatgtttggtatatacactgtttatatattgtaatataacatacatataataatgtatacaataaatatataatagagattcaggtagatgatgaaagaaatatgttgaaaatttgataccatgaggtgaaataagttgtaacatttattttattttattttttttcatttgattctgtccttaccactttggacttttcttttaatatatttttctccaatgtctaaaaaaggggtgaagcaaggaagtgttgactttgaaatttcttctgtgttttaagttataagacaaagctgtaatgtcattataattatttcatattttgaagagtcaaatctaattaaatgtgttctgccaaacttcactttccaccacaagtactgaggttttacacaataacttctgatatatggtttttccatttgaatgagccatccaaaaaaattttttttttcctttgcttgcaatggtgggtgtccaagccaaattataaggccaaaggagtgtttatttctttaggcaaatgctatgatagagaaattcatacagtagaacttgaagattaaaactcatattcctaatttctgtttttgagaaagctgttgaattcattgtgatgggtatggtatgcagtaattataatgtattttacttgattgttatttttctcttcagttttggctttttctagggtgactcattgagagagaaaaactacagtaagagaaaaagtatgtggcaatcagaaacaggcatagttgtgaaaataacagatttctaattaaaacacttctaactttcaaaaaagaaactgcttaataaacaataattatattctcatttcatctctatttggaataatttgagagattttacgtgctcacagaaagaatgacttttttcccccccttttcaggattgaactcattttgtgacttataaaatatagttaatttctgtttactgtttctgtgcagtggttccttgcagggatacattgatgatttggaatagtgtttatgatgcaaaagaactatatttagttgtagagtagtaataaaaattattttatttttaattgctctttgacaaaagtatggtttcagattttagacttcttaaaaggtgttttaaaaatgatattcattggaaataatctaatgtcaaaatacagctttgttatctttttttcttgtaatttgctgacaaccacttttaaaccagttcccaggattggctttgggaatcattaagcccaccttctactctcattttcttgttaacagatttgaagggaagactgatggcctctttcatgctacaaatagttgaagaatgaattagtttgtatttacaaggaggaatatagaataaagcaatcaattgcagatgaaatcctgggataagtttctgagacttgctacaagtgccatttatttggtgctaatgatttaatctatttttgagactgagttgtaaattgtagaatttaaaaatatttaaaagtgagaatattaaaattgaaattatggaattctattttttgagactataaatcttattctttgaaaaatgaagtggttaaaacttatttgctttgaaactgttaaattatatcccagtcaagtgagtgtaaacttttattaagcagctgttttaatttatgtttatttcagaatggatgcttggagtaaatttaaagattaaatttattcaaggttactcactgacagaatttgtgtatggtaggaaaaatcctcaaactatagcttgtgtagttttgagactaccttttacatgaataattcttaatatttataattacataaatatttttttcgaagactaacggtaagagttattcaaaactttcccttttaaaatagaatcaggccagccacggtggctcacacctgtaatcccagcactttaggaggcccaggcaggcggatcacctgaggtcaggggttcgagaccagcctggccaacatggtgaaaccccatctctactaaaaatactaaaattatctggacttggtgttgcacctgtaatcccagctattctgtaggctgagatgagaggattacttgaacccgggagatgaaagttgcagtgagccaagattgtgacattgcacttcagcctgggtgtcagcgcgagactctgtcttgattaaaaaataataataataaataaatagaatcactgtgtttctgcaacttaactttgacatacattaataaaataagttacatttatggatgaatagagggattgatagatggatagagatattatcacaaatacagcaaaatgttaatgtaaaatcttggagctgagtttatgggtattcattatagagttttttgacttttctatatgtttgactattttcataataagtgttggaggaaaatagaatcactgtgaggatgaattactgttgtaaatttcagtttgtctattaaaaatgtatatcttaatctttagtccttccagaagtgctaggtaagacagtatatgaagaatgtggggtctgatcagacctgactgcacgctaataagctctatacttgggaaagttatgtaatttctccaagcttttccctatctttaaaaacggaatgatgatgctttataggattatggcacatggctcttcatttttcccctcttgtacttgttcataatctttgtgataccatggtccttaaagtcctgtcaaacacaattggacaagtggtggagagagagcagagtgccattcatcatggtgcttagcagccttcatctcacttctgcaggacacaggggtcccatacttgacaaaaggaagagagggagagaagcagctgtccctcttcactagcagggtggtggattggaagaggatacgacttttggcatcagaaaggtctcagctggaaaccaggccctgccttttgcaagttgagtcaccttgagcaagttatttaactttgctgagccccagtttcctcatttaaaaatggaacttagagtatctttgtctgtgggcttttgtcacatttaaataacgtgtgataagtgtccagaacaaaatgcgagctgaaaacaaatactcgtttaccattcacctacttcatctttttttctccctctcatctatgtcaatttctttagttttccaaacaaccttaaatgtttttatctttcttgtttcatggtcctttagcctttcagcttgcaaaattacctgcaaaattaatgtaatttccccttttttagattattaaaaaggataataagtgcagattaaccccagtagcacccttcaccataacttcatcaaattggaagccttgctagctatcagtatcatttttcaggcctattaacatttttcaggacaattaactctagtccttgtgctgtactttagatctagtttgtttattttagaaagtgtagactagcagatattagctttaagagagcagttgtcttcaatagtaactgtttgaaagtgtaaagctttgcaacaatgtttctaaaagtagaaataatgttacctatttatggccggttgcgtggctcacgcctgtaatcccagcactttgggaggccgaggtgggtggatcacaagatcaggagttcaagaccagcctggccaagatggtgaaaccccgtctctactacaaatacaaaaaaaaaaattagttgggcgtggtggcaggtgcctgtaatcctagctactcgggaggctgaggcaggagaattgcttgaactcagagggcggaggttacagtgagccgagatcgtgccactgcactccagcctgggcgacaaagtaagactctgtctcaaaaaaaaaaaaaaaaaaaaagaaaaagaaataatgttacctgttcatatacatgtttatcaagagagatgctatttgagtaactaaaaaattgtggggttatcacttacttttcaagataatttcttaaataaaaaattgtgggacccttatttttaaagataatttctttctctctctctctctcttttttgtggggggacagagtcttgctgtgtcaccaggctggagtgcagcggcgccatctcggctcactacaacctctgactccctggttcaagtgattctcctgcctcagcctcccaagtagctgggattacaggcacacgccaccatgcccaattaatttttgtaattttttttagtagagatggtgtttcatcattttggccaggattatcttgatctcctgacctctcgagctgcctgccttggcctcccaaagtgctgggattacaggcgtgagccaccatgcccagcttaaagataatttctagacctggtttgttctcaagtctcctattcttgtcttctctcagtttcccatattgttcggatccttcttcattgctcttggcttaatagcccctgcatttcctgccttagtttgcttctgtgtatcctgaacaactgcttgcatctctgggttgccatgatgctgtaagcaatggtggctccaggagaaacattgtggtcatgagtttgtggaccttggggcaagggtgtggggtatcaggtgtaggcatggagcagagtgaaatggagtagagaattagagtggagagatggtagggtctatgtagaatcatctgttttcctgggtagccattggttcttaaactgccctaggcttctctgttacctaactactatcccctctagaatatgaagaatgtgttataagcaggagttgcttattgtacctgcaccctcagtgcattagcagagagcctgggttatggaagatactaaatatttgttaaaaggatgaatgccatcaagcctttgttagaatgatatgagcagtcttgaaaatctggatggcttagccgggcatggtggcaggcacctacagtcccagctacttgggaggatgaggcacgagaattgcttgaaagaaagaaaggaaggaaggaaggaaggaaggaaggaaggaaggaaggaaggaaggaggaaggagaggagaggagaggagaggagaggataggatagggagggagggagggagggagggagggagggggagagagagagagagagagagagagagagagagagagagagagagagagagagagagagaaatctagatggctaaggactagggcagtaccattatatgagttgattgttttagttaaagacttttggcaaaccttcatttccaggcccacttctcactgttgccccatttcagatgccttctctacttctgcacccctgccaaagattctgtcaggaatttctttcatcctcttctctgagaatttgactgtgtctcaccacattcactgctaactttctaccaaaaattgttaaaatccatcaaccacttaaggctccactatcattctctttatggttgtatctttatccttttaattctttacattttactttaaaaattaatagactttattttttggagcagttctaggtttacagaaaaatgagtggaaaatacatacagtcctcatatacaaatttcctcttcaagtttccgctgttagcatcttccattagtgtactacatttgtgacagttgacaagccaatattgatacattattttggactaaagtccatagtttagggtttattctttgtgttgtacagtactcagggtttagacaaatgcataatttccccaaattggaagcaaccaagatgtccttctacagatgagtcaaactgtggtacattcataaagtggaattttattcagcaataagaagaaaagagctgttaagccaggaaaagacatggaagaaccttaaatgcctatagctaaaggaaggaagccagtctgaagaggctgtctatactgtatgattcaaattatatgacattctggaaagtgcaaaaaaaaaagagagatagtaaaaagatcagtgatagccaggggttcagggggaggagaagatacataagtaggtagagcacagagcattttggggcagcaacactattctgtatgatgtgatgatatatcctgctgtttagctgtaaacttgatcacatttctcctattgttataaacttcagtaaacgttgtttttattatctcttctgtgtggatttactatcatttatttaaattgcatcttatgtgcatttagatggtttataaatgcttgcgtaagtatcattgcagtaaaacatctttttacgtgatgtttttcttctataatttggaagttttttcagatatattagttctggggcattttgatggaggccttcagttttacaaaataagccagtgaaaacttacattccctttctttttgatttttgtaaaatatttctctatatttaacttgaaaagtattcatgatttttttgtgtgtgtgtgtgactgcgtctcactctgtcacccagcctggagtataatggcgcgatcttggctcactgcaacctccgcctcccaggttcaagcgattctcctgtcacagcctcccgagtagctgggattacaggcatgcgccgccacgcccggctaattttagtatttttagtagagatgggatttcactgtgttggccaggctggtcttcaactcctgacctcaagcaatctgctcaccttggcctcccaaagcactgggattacaggcgtgagccactgcacacggcctattcatgaatattttattttataaaatacatgtatatttttagcaaacttgggtattttattgtcctggcacttccattatatttctaaaagaaaacacttgtttcatatttttcttcaatagactggttttctctaattcagtaacaaagtgttgacacagggttccaattatatggttaccactgagatgttttcagattgtcaatgattatatgagtattttggtacaacaaaatgatatactatgattcatttgcttttaagttatgtttttgtgttttaaatttttatttgtatgttttatttaagattctggcagaattagaaaataattgtgctaattatttgaaatgtatttattttgaaagattttttaaaatcacgtcttttagtctttcatgtagtcagtgcagagcagcgtaatttaagtaatcagaccataaatgttgatagttttttatgatgggcaaagataggtggaaagaggtgacttctctggaaaaaacatctttgttcttgcgtctgaagtttgtaacatcacatacatcttcatagtacataaaactcaatatttaagaaatatattacattttcttactacggatgttgccatgcctatttttcctcccatacccggtaggcaggttagatgtagttctgatattgaatgataaaaataccatacaattttttgtgcatgggaatttaaatttatggaacctaacatgtatgttaaatggttaaagaaataagcaatctttctttcttctttttttttttttaacacagggtcttgctctgtcacccaggctggagtgcagtaatgtgatctcagttcactgcaacctccgcctctcgggcttaagcgatcctcccacctcagccttctgagtagctgagactacaggcatatgccactatacccagctaatttttgtatctgttgtagagactgggttttgccatgttgcccaggctggtctcgaactcctgagctcaagccatccacctgcctcggcctcccaaagttctgagattataggcctgagccaccacccctcagacaccggcctggcctttaagcaatcttagtaaacatgattgcaacacacaaaaagagtgagccaaacagaaaagagaatgaagagctctaatgaccttgggattcttggtataacttccagagatgtacagaagccaatcatacgatatgaatgtctgaattccccctgctggttctgtgtggagctagatgttgcttattggactggagatgtaattttactcttattttgcataaagcgaaaatgaattaaatctctttcaaaattaggcaaatattgtaaacagtacaattgccaaactggaaatgaatgttacatttaaattatgaaagaaggcagtgtgccaataggaaatattactttgttaagaatgtagttaggttcagctgctttggtctttatttagtaaaactgaatatgtatctactctttaacacactgtctccattcttagatgtactccataggaattcgcacgtgtgtaccaggaagcccatatagaaacattcctagcagcattctttgtaatggtctcaggcttgaagcaagtcagaagaccatcaacagtggcatggataaaaagtattatgttcaatgtacacagctgaaggacctacagctactcatataaacctggatgactcttacagcacaatgttgagtgaaaagcagcttgaaaaagaacacatatagtgtgaaagttcaataggcaaaactgtattttttgaaaactggcaaaactaaactatgtcatttagggttttatttacaggtggttctgtgtgtaaagaaaagggagggaatgattatcataaacttgtaaaataatatttgatagggaagaaactacctatccctagttggcctggctggtcttgaactcctgacctcaggtgatctgcatgccttggcctcccaaaatgctgggattacgggtgtgagccaccgcgcctggccacttgtgtttttttcatgtgatgtttacaatagcccttggaggtaagtggtgcaagacaaatgtcatctttattggtaattttatttataccagtggctttgttaccagaccccaccacttacccaaagttagccctgggtcaggggtttcctcatcattgtctcttctgtgggtcaccaaaaagatgttaccagaaaggggtcccgatccagatcccaagagagggttcttggattttgcacaagaaagaattctaggtgaatccatacagtaaagtgaaagcaagtttattaagaaagtaaatgaataaaagaatggcgactccgtagacagagcagtcctgagggctgccggttgcccatttttatggttatttcttgatgatatgctaaacaaggggtggattattcatgcctctttttagaccatatagggtgatgtcttgacaggttttggccaggttctttactgcagccctttttttttttttttttttttttttttttttttttttgtgacagagtcttgctctgttgccgagactggagttcagtggtgcgaccttggctaactggaacctccgcccccctggttcaagtgattcttctgcctcaacctcctgagtaactgggattacaggtgtgcgccaccacgcccagttaattttgtatttttagtagagatggggtttcaccatgttggtcaggctggtcttgaactcctgatctcgtgatccgcctgcctcggcctcccaaagtgctgggattacaggcatgagccaccatgcccggcctactgcaacctgttttatcagcaaggtctttatgacctgtatcctgtgttgacctccggtctcatcctgtgactcagaatgccttaacctcctaggaatgcagtccagcaggtctcggacttatttaacctagctcctattcaagatggagttgctatggtttaaatgcttctgatagcttcaaggattaattacaagtgcatgtacataacgccttatctctggcacccacctctcttctaactttgtggcacatgtgattaggactctgttagtcttagaggtacctaaatctgtgcttctattctacctttgctgtctcagaaaacctaccttccatttagctctcaaagccaagagctaacccaactgatgcaggatttttcttcttagtcactctgcaagttggggacccctggtggtgatgccccgcctgggtcttgcttggccatgctgacatgcccccggtcacctgtgttatagcttgtacccatgttcagcggttcccaagttctcgtaccatgcccaagaagaatgaggatatgcaggacattgaagggtgcggagggcagagaagaattttattgagctatgaaaatggctttcagcagagaggggatgcataggggatgcttcctttacctgaaggtgggaaagttctccctgtgtggctgggtccagggtctcttatggactcagactggggagtgtgtgctgattggtttgtgagtatgcaaaaaaggttaaagtgaagacaccactcaaaggtggacacgacagtgtagaaaaccaattaggaaagggtcagtatatgtaaaataggtgaagggtggggaccagtcaggggaaagcacgccaaacaggaagacaagttctcaatccggtctgaggatttaacttgcagcttggctttcaggctttaaactctctttggcttagaggtgaagtttcactggggacctgcccctgtctgcctagacatttggctgcctcctgctgctctcacagcctctgttcttgatttcatcctttacgtcccccaatcccaatataccctcagttatacagtcacacacagtgcatcaacataagcaatagtgaagtttatcagctataccagtgtctgtagctttcctagagataaagatggccagtgtatgagaaaagaaaaaaagttaccaggaaaatataaatgtcttaagtttgtaggtacttctcaattttacctccagatcatctgtctgccccttcctctcataaccttaaacttcatcatctctcatgtgaattctttttttttttttaattattatactttaagttctagggtacatgtgcataacgtgaaggtttgttacatatgtatacatgtgccatgttggtgtgctgcacccgttaacccatcatttacattaggtatatctcctaatgctatacctccccctccccccaccccacaacaggccctggtgtgtgatgttccccaccctgtgtccaagtgttctccttgttcagttcccacctatgagtgagaacatgtggtgtttggttttctgtccttgtgatggtttgttcagaatgatggtttccagcttcatcgatgtccctacaaaggacatgaactcatccttttttatggctgcatagtattccatagtgtatatgtgccacattttcttaattcagcctatcattgatggacatttaggttggttccaagtctttgctattgtgaataatgctgcaataaacatcttttatgtgaattcttacagacctaccttttgttacagttttttccacacttttcttttggagagaactttctaaaacagctaaaactttattgtgttggctctcttatttatactcttggtgtggatctcactgataataagattgtaaagccctcagtggcacacagtgaccatcgtaactggcagtttgcctgcctgttgatcctcagttccacttacatgatccttcccttctccagctgtgccttgtgcttctctgcctctgtggcttcggtcctgttgtccctctgcttagacctgtgctgtctctaaggaagcctctagccacatgtgacttttgagcattgaaatgcagctgcttgaatttatgtgttccaagtggaaaatacacaacaaattccaaagattcttaaaaaatgcaaaatacttaattcatcatttttatattgattgcattgaaatgctaatattttgcctatattggattaaataaaatatattaatgtaattatttttacccatttctttgtaattttttagttggctactagaaaatttaacattataaatgtggcccttattgtttcaattgaacaacatttggctagaatgctttaccttctttttggcttaccaagctcaactgtaatcctcttaagcatatatgttttttaatgtaaaggcaacattttctatagtgtattgaattaacaaggtactaatatagaggaacattttagcaacaaagtgaaatggcctggaaaatacagatatgagtatatactctgtatttggaaaatatagagaactgtaaagaaaacttaaaatatctaataattcttttggccacacataattatggttaatagtttgatatatcttctatgtatgtgtggcaaatatacatacatatacactctttcacatgtatatgcataactgaggtcatacttcaggtatgtaattttacacatgcgggggcatcttttgtgctcagaaagtaatactggcagttactcatgttttataccaagatttttatactttattaaagtaacattttcaagtttaccctttccttcagcttttaagttcagggtaacttaaattgaataaattttagcagtagctttcaaaaagacctttgattaatattcactgaactcaggttaaacagactgaatcccatgtaattaatgtcatttataaacttagctaattaaatccattaaaataataaaactgccattacaaatttgatacattagattttctttttaatcacttgacgtgtctacccaaagcacttcctattcttaaacaatcatagtatatccaatatagtgaatttctaattcttttaaatattttggtattatttacaagctttgagttttgtatgtcttggtgctgcacgcgtccatgctgttttaccttaacacagggatggctggctatacactgaaccattatgttgtccctgtgatagctaagaattctgggtccatgccgtctggatagggttgatttcgacccttctgtgcacccatgggttcaagttacattagcactttatccttcagggagatttatgttggccagtgtttcttaacctttttttccattattattcccctaaggatcctttttgggtcattttttcctaattgtcatttctcctgcaatggcaggaaattttaagaccacagatatactatgtattgattatgtactttatatatctatggtttatacattacaaagttagatttaaaaacatttgttttttttagagacaggatcttgctttgtcgcccaggctggagcacagtggtgcgatcatggctcactgcagcctcagcttcctgggctcaagctatcttcttgcttcagcctgctgagtagctggaactacaaacatacaccacaacacccaactgattatttatttatttatagagactgcatcttgctgtgttgcccaggctggtctcaaactcctggcctctagtcagcctcctgcctcagcctctcaaaatgctgggattatggacatgagccactgcatccagcctgaaaagttagttaaaaaaacaaacaaacaaaaaacctttcaatcaaactttcaagtttgccacctttgagagaaaatccatagcgtaagcataaatctgcagccttctacttaggttgacccagttttctctaagtatgctttttactgctggattgcattttctgttcttttcatatctgtctgtcaggcttggagataactttcatagatatttaaattatactggatttgaatctgaatttttttatgctcttgtctagctctgcgataacaatactaacgtaatgctaatgacaatatagcttttaaaatcctatcttgtttatgtaccgttgtggtgtgttttctatgccattaatatttcttcatgaatgtaattttaatggtgtattatatggatctacccaagtttatttagccttcagcctatggttggtcattttggtggttttcagtattttgccattccagataacactttaatgaacatctttctacattacactgcagtagaacctcaggaagccttactacctgagcaggaagccattggacccatagttgcatctgccagagaccccacagtgagcaaaaagaaaaatggttcccctgttcttttccccttcccgtctcccgccagtgtctcccattgtcagaccctaacctgaagccagcaggcaaagtagttttgggaatatagcttgcaagtttgtagctccctgcagtacagatcatagatgggaggggtggaaatgaaagcaacagacatgaaatagctgataatgtggtctttattgtagagaaattatataattctcacgaaggtgcacaactagtagacggtaggactggactttaaaatcatgtgtggcttcaaagccgggatgttttcatgataccatctgtctctatcttttcttttgttgattcactgtggattgtctccattcttaaggttacccatggtccaggatggctaaaccagctccagccatcacatcttcattcaagtcagcaggacttgaatgtgtaagatatacatatatatatatatatatacacaccaagtgtgtatgaaatgtctgtttataaaattttaaaatgttgcataaagagcattcagagttctgaaaattaaaaagtaagtttagctataattctgtctctgtaaaaaaaatagctgtttttggtctttctcattctttttcagtttttgttcctagatatatgtatagattatatttcagcaaattaagtattatagtatttattgtttaaaatgttaagtaatgtcattttattttgtcattagagaatattaagggtacattatgaaagcaaaattgcatattgcagtatttttgaaaagctggagtctactagagaaaggtgcagtttgaatccaagctgtcacttttattaatttcagttcctgacttggtcacatcaagaaagcaggcaaattcttgctgtcaagcagctgaagtcattttcctccttcttttggttccatgattcatagcacatgttttgaggcaccttgttgcttttattcaaaggaaggatgttagggtacttctgccagttttcatgttgttaatgaagctcactggtttatctgggcacagttgtttgttctgatctaagttaaagaaaggacatgaaggacagggtatggaaggtaaactatcttttctgccatatcaagtgaaaaggagtattcttggggcactgcaaaggttttactcagatgaggtgtggcagtgactgctagttgtaccccttcctcattttagctgaccacatgcacaccaagaatagaccatatttctcattcttctttgtaaccaggtatggtccatattttagccaatggaatgtaagtagaaatagtatgggcaaatttgcaggtagaattcttaaagggagtacatatgctcatctttttcctgctgacttgaatgaagatgtgatggctggagctggtttagccatcctggaccatgggtaaccttaagaatggagacaatccacagtgaagcaacaaaagaaaaggatcctggcttttgaccatgatgaggcaatgtgcaagctctgctgcctttacttttggacttttgttgaagccattattatacagttctgttgtaactctccttaatcctgactcatactacgatataacatatagtagatgaaggcaagaccatgacataataaactagctttctagattgaattatttgcagaagtgattatcagaacttcataacaagcagaagagagtgggataagagagaaccatatattatacttctccctttctgcgtaccagtgattatcagaacttcataacaagcagatgagagtggggtgagagagaaccatgtattatacttctccctttctgggtaccagtttgtgtcctcagtctccagatattttcgtcatactcttcacaaaataaaacatttaaatccagagtagaagaaacaaaaacacagtgaattacacgaagaatcttctttgttaaatagaccttgaatcctgaaaatcatagtaattcacaggttgttgagaaagccattagagtgctctttaagcttagtctttagagtggaagaaaataaatgcataactcacttatgaatcgagaagttagaagcctgttaccacatgctcaggtttcatagtttatcttataaatatatgcacatttgaagttctactttggtaaatatatccatgtttattactgaaaaggtgtaatcacatgcctgttcaattacttaattaacttccttgaattccttttagaaaattaatgttccaggaaaatgtcattctgtggttttgcttattcctagtgcaccatgggctgtctccaagaattcacacatcccagttcaagaagcgggataatatgtgatttgtgcctaaaggagtttctgagccaactggatttttctgtctttcttttctgagtgatgtggtatattacaaaaaacataaaacctagacttaagcctgctagttttctgaccttagaaggggaaaaaataattaactctctacttctgggtaacctttgtgatctgaagttttaatttgttgtgttatgtctctgctattcacctttcttcttaaaatgacctgtcaggcttgttggaccttcttattctattcttcatgtatcttggtctcctagaatttccatttctcttccatctgcattttgggtaatttccttggatttatctttcagtccactaatcttcttttcagctgtatctgatctactatgaaatactttcagtgacattttctaatgtgtgagttataatgtgtgtgcaatgaagtacacatcttaattgtacaacttgttgcagatctaagtaagtgattaagtaaggtgaggacttagaatggactgttggtaaatgaatggagctggtacaatggagcttggtggttactttgtcatgaatcatttatttggaatggtgtttaggaagctaattaggatgggtttaagggagaaaggaagtcagagtataggcagaaaaataaggcaacaaatggaagggtgcatggattctagggaggttttttatttttgtttttgatcggaaatttttacatatttgtacactgtgataggaataattcagcttatttccacaaatatttattaaatgcctacatttcattgagcttacattttattcaaaacagagagattgatattcctaaatataggaggaagtatatttcatctgaaggcagaatgtacatgttgatacaggtgaatgtgtagattttaaggtggaaagacaaggtagttctcttctgatagattctgtctttcagttacaaagaggtaagagtcagctaagcatgaagattagggattgttgttagaagtttaaagagaacaataggtttccccagggactaggtcaatgtagtaggattgctgggcagagctgggggtgcacttgagatttgtggtgatgaacttaaagtaagagcaagtggaatggttatattgttcttcagctatatgtaactgccctgggacatggagtaggtggagagttggatttaatcaagattagggttttgccaggcaaatatggaggaaaagagaagtgagggaattgggaaggcatcagcaagaaagtgatttcagtactgaacttcagaatcctagttgggtgaggagggaagtgaggacatggagatggcgatggacaatgagaaaagtagtagagataacagagcgggtcaaaaactatttgagtcaggactagaggaagtgacctgaatgctgggaagtggtagtcagggagtggaatgcatgaattcagaattgtagtggcagtgcagtcaccagtggagagaatgtctaggcaggatgagactaaggggctgggtagctgaggtagaatagaggaagtgcaagcagatcaaggacttagaggctgtgttgttgggtgccttgtctgcagggacgtagaaatttacaaaatgagcacgggagtagtgtggagggaaagacagtgagctaggtgctcagattatcagaaaatgagcaggagtgatggtgatgtctgcagatgactcgagcaagaaacgttgatggatggagtagtctgatgggctatttcaaggtagctgggatgtttgaggagaaatgacttggaagcagtaatgaagagtcatctccatggtacgtggcttgtggagagagaactaagaggtcaccatttgaaaagccttctgagaaagagctgtcctcaggggacacccaggtttctgttagatcaagggtattcaaggaggctgaggttgacaatatagaaggttttttcctaatgaaaatgtgtgctccagaaggctcagtggaagggctgggatgaagagagctgtgggcaatgaacagggatataaagcataatatgataatgttggtgttttaggggaaggtaggtaatgagttctgattctagccgttgacaatttgttgggttaaggctgttggcctcctggccagggaagtgggtgtcctacttgaagggttgagagctgtgggagcctcttttatatcctgctggttccttatatcctggcaggggaaggatgttggcagactatggtcttaacagtccatgcatctctgtattgtgtagggttaaccagggaacctaaaaccatctttgaccattttgaagttaatagaaacttataattgaaaaagctagcgtgcatcagttgaagactatgaccaatataaagccaaatgcatcagtaacagaacatctttcttccaaactgcaggaattccagacacctgtggtgtgtctgtgtgtgcatgtatgtgcatgaggagctctgcagcacaaacaagcactgcatgcatagcagccagactgttttgtaggagacttagttaggatgtcctgtaaatgctagtaattttccccccatgtatatgaaaaccaaatgcaatatcccataattcatttagtaaattaatattaagttggtattaatcatagtagtaaaaatgaaaatgaaagatacatactttatgccattcatttgtatgaatataggaaagcacttgaacttttggcctgtctgtggtccttcagaattgggcagtggaacatcctgtgggaagcactgtcatgtgggtacctcagagcctgccctctcttttcagccttacctcactgcacagctccagccaaagggccacgtgcaccaaagggtcacacctgaccagcttttaatcattccatacactgaaatgccttcctcctctccacttgcagatctgtctctctccagcacactccaggtcataggcagccttcttttgaaagctctcctggagttccctagcagacttcatcatctgtgttcccacaggactttgtaaacctctcattatacagtattagaatgacattcctgctcgttttcttctttaaaatcatgggcaccttaaatgtagtgacaacaatttattctttgaggaatttgagcaggcctgcaaagagacagtttagtgaatgcttgttgaaggaatgaaccataaagaaaggggcaaaatgcctaagagagattgtccctcaggagaaatcaggaaatgcagatgtgataccaagatgaacagatggcagaagaggcaacaaatcaaaacaagcaaacacaaaaaccacagaattgcatctttttggactagcaactgtttccttttggatatggggttctgtggatgaggatgaaggagtgggagagaagtctgggaagataatttggagctagactcactgaaaaccacaaaatgctattctctagaacaaatagattgaatttaggcctgttaaatcccaggtgctgaagttctgttctatggcagattctaaacttgtattattttcagccaggatgaggggctccctttatggttttggagtaggagaggcatggcctggtggttgagagcatcagttttagagttggaacagcatggatgcaaatctgcgtagcattctgttatgtgagtaagggacttaactcctttgagctttaattctttatgggtaaaattgggtgaataaaaatgctagtgagatttcaatgtagtaatttgtgtggatcatcattaaatagcagaagctactgttttccttcccccttacttctcttctttcactcgtccccccacctccgccttcaacagttccttgagtatgatggactttaaactttatggatcacatatctcatcaatataaccttttaaagcagcacccctgatttaggttaattgatttagaaattatataatgcatagttatattaattatgacatctacagattgacatttttccaaggataaaattaagtaaaatttttaaagcattttaaaattgtgttttcacagtaagaaaatcttttatattggaaaaatattaataatcatctgaataagttttataaaatgctttgctaatcatgatggcttaatggtatcattgtttaatgttgcaaggaacagtatctatttagagccatgttcattgttaataatggtggatgtaaatctgtatttcagagagtcttggtaatggatagaagagcagttttcttcagagatctgattaatattgtctttgttcttagctcacaaaaaatggctaacagagctttttttgtatcattgtcattggcttgtactcggatcattaatgatttcatctggaatttctttgcacgcaagttttaaaatagttttatgattccattatttttaaatggaattttatgagaatcagtttagttaaacctaagtggtaggattatgcacactgaaccaccatgtgtcttattttgtgagagagaaggaaggagagggtgcctgtcactcctgttgcatggcagggctgcactcttctctcagaatacctagggcaccacacatgactgtgacttcctgacagatagaccaagtgcaggtgccactatcaggctggattatgcatactgctgaagcttagctgctgcatatttctgagatgaaaaacaaagctctaatattttctttcctcaccagctttggagactactagtgttagtgtatgcttattaactgcttgttgaaatgaattgaatgctttggggatagtttttcaatttcataaatactttcagatcattcctatcactcctatttgcatatttcacatttactacatgtaactttcttttctggattacttatgtcttgggaaccttttttttttttttttttctgagacggagtctcactctgtcacccaggctggagcgcagtggtgcaatctcagcttgctgctagctccgcctcccgggttcatgccattctcctgtctcagcctcccgagtagctgggactgtaggcgcccaccaccatccctggctaatttttttgtatttttagtagagacggggtttcaccatgttggccaggatggtctcgatctcctgagctcgtgatctgccagcctcggcctcccaaaatgctgggattacaggcgtgagccaccacgcccggcccaggaaccttcttaattctttttaaggagtaaaggcatacacatttatttaacatgcatacatggaaacccccataataaagaccccatattagaatgaagaccccttgatttattaatttgaaatcttctttttcaaatacttacatgtgtccctttctttcaaagattttagttttccagtgcttccagaactcccatcttattcctctccttaggttgatgactttactattgctaactttaaggtttgaggcaccgtgctccataactcaggctttcttcttggtattatcaataaaatcaaaataagagtttggggaagaaactctttctatctttccttgaatattactttcaactagggagtagtagttactcaaggattcctttacttttggcccatgatgatattgcacagaaccaatccttaattcccagaaaaactaacagccagagacctatatggaaaacatgactcaccacaggtaggaatatatctatacaatgtactttattacatctgctgtaattcggtttatatttactgcttcacaagtagaactcaagttcacttgagtttttgcaatataagcagttagcctaagattttactatgtagaaacctttttttttttggagactgagtcttgctctattgtccaggcttgagtgcagtggcacgaacatcaacttactctaatttccgcttcccaggttcaagcagttctcctgtgtcagcctctcaagtagctgggactacaggcatgcgccaccatgcctggctaatttttagtgttttagtagagatgaggtttcactatgttgcccaggctggtctcaaactcctgagctcagggaaccggcccacctcagcctcccagagtgctaggattacaggagtgagccatggcacccggcctactatgtaaaaacttttatttgtagtttccaaattgattctttttggttactatattgttaacgttaagtttattatttatgtttttgagtatgtcaaaatatatattattgttgattgtttctgataaaatctcatacataattcaggcttcaatcttgatttttatatggagaaagaatttcatacaaatatgtatatatttatgtatttatatatttatatatatatttatatatatatatatttatatatatagctttttttttttttctcgagacggagtctcactctatcaccaggctggagtgcagtggcacgatctcggctcactgcaagctccatctcccgggtttatgccattctcctgcttcagcctcccgagtagctgggactacaggtgcctgccaccacgcccagctaattttttgtattttcagtagagacggggtttcaccgtgttagccaggatggtgttgatctcctgacctcatgacctgccctcctcagcctcccaaagtgctgggattacaggcgtgagccaccgtgtccggaccatatgaatatttttatataaaatgtaaaaaatcatctgtaaaaatgcaaaatttaaataattctcattgttttcctatttaatgtaatacaaaagattgtgctagatcctaggagtacaaaggaatcaaaccatggtgaaggagggaaggccctctctcagggaacccacagtttagcaggaaagatgggtatgcatgtcagggttgtttagtagtggagggtggacagggtgttgcaaggttaaagtctgtatatcgtaaaggaactgttttaggaacagggcttgttttgtttgaagaaggagtctctggtggtggtatacactatcagatgcttaaagacttgtctgttttcctaaagggtaatatttccaaaactttagccacatccatgccactgccacgattttgtcttatatgagtacaacttgaattccagtttacttagttcactttagaatgacttactttttcaaaattgtaagcttattatttactttattcttgtactatgtgggaaagtccttgatcttctgagattgatgtgctagttatatatgtctaatatacataactattaaagatttttttaaaaagttttcctctgcttacaccatcatcattgatccgtgtaccattttgggaaacactgctttaggggatgacattgggacatatggaatgaagtttctgggaaccggactcagacttgtttaaaggaagggttgtctgcccctctgagctcacagcaccctttcctgtttcatggatcatagttaatttgtttattctttttgcatatgtgggtgagataggatttatctctgagggcacaaggcttttacatttattttgtttccttttatgcttcacattttaaaatactacctgcgtcatctaagtttctcataaatgtttattgtagggatatgtgaaccaagagttttactgagacagttgaattctagtacctttcatggttgttcattttagaaaacaagtaaacaggaatcgatcttcataattactgaaatatttcagtggatttttttcaactttttggaaacagttctattttctattcttcaaggaattaaacttaaaaaaaacttccatatgacatatattatgccagattataagtcagagagattctgacagaatttttttttttttttttgagacggagtttcgctcttgtcacccaggctggagtgcaatggtgcaatctcagcttactgcaacctttgcctcccaggttcaagcaattctcctgtctcagcctcctgagtagctgggattacaggtgcccgccaccaggcctggctaatttttgtattttttagtagagacggggtttcaccatgttggccaggctggtcctgaactcctgacctcaggtaatccacctgccttggcctcccaaggtactgggattacaagtatgagccaccgcacccagccacttctgacaaatttgaaactacaaaggtggataaaaagttttactgtgctatgagttttaaaaaacatttttctttgttcgcccatgtgttttttttctttcttgagatggtcaaagcattccttttgggagacaggatgggttagtaaaatcgtgttttgtgttaggaaaattgaatttgactcaaatctgttttaggaactagcagtcaccagatatttcaagagtgctttaagtgtaaatacatgtaaaaaggtgaaactattagtgacccttttttcccctttcctagcattataacatgattggctgtcattcaaggttgtgtatgttactgttttacatgcatttttaggctggcaaaaataggtgttggagactgtgttttcttaatatatatgttgattaaatagaaaaagtgatacttgaggattatgccctttaataaagatgcaacatcaagtatgcttttttttttctgattacaccaacactgtttgttttaggaaacattgttgttctaaggctattctattaatttttttctaattaaattttattgtttcttttgttgtgtgttcattttagaaatcaaagtattttgatgaggaaaaaaaatcacccaacataaaaacataagcacttgaagcatgatatatacccattatcattattatcataatcattttacaaaaagggatacatacagtgtttttctttttcttaatggtaaactttttatttaagtgtaacatatagaaaagtgcataattagcatgtggctcaagtaattattataaagtgaatgtgttcagtcaggtgaaagaattccagcactccagaaccctctctccaatactctcatcttcactctgccttcccaaccactgaggatatcactatcccaacttctaatacgctaggttagtcttgcatggttttgaactttatattgatgtattcttttgtgttttacttcgtttatttgtgaaattcatccacatttctgcatgaagcatagtttgttcatttttatgacaactaatttcattctattaaataatttaagtacagtatatatttatacttcatcctaccactagtgtctgaaagtacccatctcctagtgccctcatcagtgttaaagtattacaacttaaaatataggattaaagccaattgacacctatatttagaactttgaagataacatccttttcctttaaatagcaaatataaaattcttattacttgtacactttaaaaacatccttcagtaagtactttgtgaaggaataaattaagtttataagttggagccctccaagatttatagaatgtgaaaaagagacagctctttctcttcaaggagtctacaggaagacttgtgtatatataatacacataagtataatccaagtcagacagtggtgcagatgatcataggagatatagccagtgtgctatgagagaagagaggaaagaatagttattttttgctttgtattagaacaaatgactgtgacttggaccttgaagaattttctaagcaaggaaaaaagagagaaatgagagaaaattttaaaaaggtaggaaatagaatggcattcttggttgaatctaaacatttagtaaaaagtccatcaaccaatggtcagttctagtcattgatagatctctgaactatttccccccaccaatagtcatgacatttaggtaacttttcttattccccccgacaaactgactgcagtttatttatctgtctctgtttcatgttagtttctcctttagactgaagctgcgtgggtagggcattagtgtctttttggtacatcatgtctaatccagttttttgtactttgctcaatccatagcaggcccttaataaatgatgaaatgaatgtatacaagtacataggcagcaaatacacatttgggcacagcaagcttcctctgtggtaaagtatagattggtcaggacccttgaaagaaatcaactttgaagaaattaactgatcatcagacaaatatttttttccatatgaatgcttctagctagaaatagtatggttttgggtggctcgtgcctgtaatcctagcacgttgggaggctgaggtgggcagatcacctgaggccaggagtttgagaccatcctggccaccatggcaaaaccctgtctctactaaaaatacaaaaattagctgggtgtggtggcacctgccacccactactaatcccagctactcagaaggctgaggcaggagaattgcttgaatccaggaggtggaagttgcagttagcgagatcacgccactgcactccagcctgggaaacagagtgaaactctgtctcaaaataaataaataaataaataaataagaacggttttggttttaaaagatactaccattagaggaagctgggtaaagtgcacatggaatacctgtgtatttttttttttagcaaagcatgtaaatctacaattatcttgaaataacaagcttaaaaaattgtgatgagccaagaatttttttaaaaagcaataatattctggaattttataatacatacctgcattagttaggatatcggtttggcttttagtagagaccagacaccagtagtttaaacaagagagaaggcttatatttctctcacatggaagtctaaactagtctagaggcaggcttgctttctgaggttatccagggaccaaagttcctccaatcttgttttaccattcctcctgcagtgtcctcatacatggtttggctcccaacactatgcctgggttctagccaatggcaaggataaggatgtgaggagaaaatagcttccttttaaggatatgacctgaaagttgcatgtgctgctcccgttcatagcccatttgttggaatttagtcatgcagacatattttgttgcttcaagaaagactgggaaatgtagtcctacccagctaaatctaaagttttaaaattttatttttatcaaaaagaagaaagggagcatggtgtggaggtcaagtagctctgccacagtgtttgtcctgaaatgcatgttcaataacttttttggtgaaactttctttccttattattttactatacttatgtaggaaaagcatgggtgttttaagatttagatgtatttgttgggtcatgatggaagtaaaaatcagtttatatgcagtcgttttaatgcttgtatcctcattactttccccaaaggaagagtgtttcttctttgtatttttggttcctagcatgggacctgaccctaacaggaactcattacgtgtctattgaccgttagccttttatagatgttgactgaacatctctagcagaatttttatacatctctgctatctgacctgccttctccttaattctttcatggtatatggtttgtatcagtattacagttttaaaatatatgatatgccccttttaggagatttttgtaactgtggctgacagtgcatagtatctttttttttggtatagttctgattgaatagtgttttgtaatatgtttgttagatgtaagaaatcatttatagtttagcaagtagcatgtttaatatgaaaaagcagtaacttacctctatttcattcaatcttgataaatttatcaagcatttgagttcattttttaaaaatgaggtttattttttccttgattattatttttattgatgtttcatactttatgtcctcttcacattttgaatgttaaggataagtagtcttcagtcagtacttctttaaaaaacttgaattgtcaaccactgatcaaggaaataagagaagacatgaacaaatggaaaaacattccatgctcatggatagaaagaatcaatattgtgaaaatggctgtactgcccaaagtaatttatagtttcaatgccatccccatcaagctaccattgactttcttcacagaattagaaaaaactgctttaaatttcatatggaaccaaaaaagagcctgtatagccaagacaatcctgagcaaaaagaacaaagctggaggcatcatgctacctgacttcaaactatactataagactacagtaaccaaaacagcatggtactggtaccaaaacagatacatggaccaatggaacagaacagaggcctcagaaataacaccacacatttacagccatctgatctttgacaaacctgacacaaacaagcaacagggaaaggattccctatttaatcagtggtgttgggaaaactggctaaccatgtgcagaaaactgaaactggaccccttccttacaccttatacaaaaattaactcaagatggattaaagagctaaatgtaagacctaaaatcataaaaaccctagaagaaaacctaggcaataccattcaggacataggcatgggcaaagattccatgactaaaacatcaaaagcaatgacaacaaaagccaaaattgacaaatgggatctaattacactaaagagcttctgcacagcaaaagaaactatcatcaaagtgaacaggcaacctacagaatgggagaaaatttttgcaatctatccactgacagaaggctaatatccagaatctacaagaacttaaatttacaagaaaaaaagcaaacaaccccatcaaaaagtgggaggatatgaacagacacttctcaaaagaagatatttatgcagccaacaaacatatgaaagctcatcatcactggtcattagagaaatgcaaatcaaaaccacaatgagataccatctcatgccacttagaatggtgatcattaaaaagtcaggaaacaacagatgctggagaggatgtggagaaataggaatgcttttatactgttggtgggagtgtaaattagttcagccattgtggaagacagtgtggtgattcctcaaggatctagaaccagaaataccatttgacgcagcaatcccattactgggtatacacacccaaaggattataaattattctactataaagacacatgcacacatatgtttactgcagcactattcacatagaaaagacttggaaccaacccaaatgcccatcagtgatagactggataaacaaattgtggcacatatataccatggaatactatgcagccataaaaaagatgaattcatgtcctttgcagggacatggatgaagctggaaaccatcattctcagcaaattaacacaggaacagaaaaccaaacacttcatgatctcactaataagtgggagctgagcaatgagaacacatggacacagggcagggaacatcacacattagggcctgtcggtgggtaaggggctagaggaggggatagcattaggagaaatacctaatgtagatggcaggttgatgggtgcagcaaaccaccatggcacgtgtatacctatgtaacaaacctgtaccttctgtacatgtatcccataacttaaagtataataataataagacaaaaaacttgtcaacaccagatttgttcttttagttaattttagtttttagtttttagttagatggattttaggagttagtttggaagacccaagggatacaattaagaaactttgggaaccatcctgaatttggtttttggaacacaaggaaatattttgtaactttccttatttttctggtggacaggtttttgtgtgtgtttttttttttttttttttttttttttttccaacaggaaaatgcaattccactaagattcttaggtcatagatcagaggcttggaccagcaaagagaaaggaacttttggaagaatctttgtccagtattatgggccagtttaaactgtaatgtaggcagtgacaggctgcttcatctctccctgcagtactgtttaccagaaaaaggaaggagggctctgtgtgtgtgtgtgtgtgtgtgtgtgtgtgtgtgtgtgtgtgtgtgtgtctgtctgtctgtctgtctgcctgcctgcctgcctgcctgtctgtctgtctgtctgtgttggtggattcagggaaagatggagaagcttcccaataaaatgttagtttatctgacattagaagcagcttctcagccctcttggaaaatcttgaagaaaggagagtgaatctgtgttgaaagggaatcagaattttgtttgtgcaatttattcagtagtagtcaactcatttctactagcaataaagatgagcaactgtgaagaggatccaaaaaacacttctatttgaccttggggaccatgttgtgattatttttgttgcagattgaactttgtaattgtgtttctcattgctctgaatcctggaacacacagtgatggatattggagctgactgtcatggagcatactctgagtggaagaaaatggctttaaatgttttaaaatgatacaaataaacaacacaaatcaatcccaaagcaaataattaatacttggctactggctgtaccttcttaataattttgattttcttattaaatgtctcaagttcttcaactatgtcatgaggattgttttgaataaacttaaatttgtggtctataattaccaattattgacaattttaattcagattttccttatgaaatggagggagcacattatttaacagaaactttcctgtgttccccagtcatcttaaaatccttcctgtattaaaaaacaaaacaaaaaaacctcttcttgctgatcctcgagtttgcttatacctatactgaaaatttataccagatttgcagtttgaggttcccagtatactcttttttgaggacctcgaaatttagggatggggactatttccccccttcccccataacagctccttaaaagttagtagtaaaaccatttcagtaatcatttaaaaagcttgatatttgtaggctcacaattgtgtaggaaattacatatttaggctattcataagatactttattttgtgtgttcagtaaaaagtacaaaatattataaatgaacagatgttcacactgaactgtttacaatgtaaagtagaaataaaaagtatctgcctgtgttagttcggcagaaacaaaacgtttcagttgcttgttttgttatacattgcttataatttatttacagaagcacttaattcatttaataagtgtttttgtaaaaaggacacctgcccattataataagtaataaaaaatatgtatatgcaaagattaaagttaaatatcacatctattgccatggtcctcgatataatcagagctaacatgttgatgatttttccctccaaaattatcaggaggttttctgttttgttgttaaagtaaaaattacagggctttgtcctagttccaaagtatttgcatcacatttttgggggagttggtgaccaggaattttcctccttcccttccttattatttttaattgcttattatgcttgaatacgtctctgttgtagaagagtcaagcaatagagtaatactacactgaacaaagtctgagactctcctgaagccaccttcactcccactctgctccatgacgaatgaccactgtctacagtggaccctgccagggacctgtagatggacttacatgcatagatatgtgtatttgcaagttcttaaaacaaatggagcatgcatatatatacatatatatctatatatatgtagtttgtgaatggcctttttcacttagtgatttctgatgagattttcccatattctacatactaatgggatctatatttttctgttattttaattttattcttttacatttatttttaaagaaataaatatattattactggggaaaaattaaactatacaagtaaaacaaaagtcttccttgaattccttgaattccatgcaatcccacttcatcctctagagataatctctgtttgcagtgtgatgtatactttgtccttcttgttttttttttaaatatgtacatatggatacatatatggtttggtaagtgattttttaaattgttacatcagtttttctgcaacttgtttttttcacttaacggtatttccttgttggtacatagacatctacatccttatattgtattccatggtatagtttaaccatagcttatgtcaccattgttactggtgagcatttatatgttgtttacattattggaccattataaacaatattacagtaaacattcctatacatgctcttttgtgtgcctattcaagtattccttggtatagaaaaaaaaaaagaattgctgggctcatgagtatgtgcattttattttcaatgaaaactgccaaatgtactttaaaaagtcctgtaacacttggatctcttactactgataatttcctatacctttactgatactactgagtcttatcagtgttatcagtcttttaaaaatgttctagtctcatgggtcatctcatcatcattacatttttaaaaattattgtttagacttccgttgtccgtttaaaatatataaataaatatatatgtgtatatatatatatatatgtgtgtatatatatatatatgtgtatatatatatatatatatatatatatatatatatatatatatatacacacatatatatatatttgagataggggcttattctgttgcctgggttggagtgcagtggcacagtcacagcttactgtagcctcaacctcctgggctcaagtgatcctcctgcttcagcctcatgagtagctgggactacaagcatgaaccaccatgcccggctatttcttttttaattattattatttgtagagacaaggtctcactgtgttgcccaggctggtcttcaacttctgggctgaagcagtcctcctgcctcagcctcctttattgcccattttaattttggattacttttttttttttttttttttttttactgatttgtagatttttaaaaaaatccttttgttatacatgttacgaatgttgcttcttcatatgttacttgtctttgtgatgtgttttatcatgtaaaagtatttaatttttaaatggtcaaatgaatattcttcatgtattcttgaatgttgtttcttacataagaaaagggcttccctgactcaaggtttatacatatgcttctataattaaatactaacaaaatttcactgtcccaagaacacttaacagaattttatccttttcttactgatctggcacactacctttatcataatcttaattatcaaatacatgtagctctgtgctgacctaatttctcttctgttgacctatttgtctcctctgctgccaaatcacacttttacatgactatagctttatacaaattgtactatgtgaatggttgtatacttccctaggtcggtctcagaattgttttcttatgtatttttttcatgtagaaatgttttatttacactgtattacaaaatatcacataaagtcttgttggtattttgatggttattatactgaattttagatttacttagagacatttgacttttttttgtttttgttttgttttttgtttttttttgagacagagtcttactctgtcgcccaggctggagtgcagtggcatgatctcggctcactgcaacctctgcctctcgggttcaagagattctcccgcctcagcctcccaagtagctgggagtatcaggcatgtaccaccacacctggctaatttttgtatttttagtagagacggggtttcaccatgttgtccaggctggtctcgaactcctgacctcagttgatccatctgccttagcctcccaaagtgctgggattacaggcatgagcccctatacccagcctagatttgacattttatagtattgactctttttgtccagaaacatgttatgcctttacattaattcagatctcatatggtcttcaaattctatggttgtcagcctaaagatcatctctattttaggtttattcctgaatattttattggatttgttgctattttgattggaattaaatatattttctaattatttattgattgtatgtaaagcttttaatttttattgttgttggtggtgttgaccatatagccatagtactgcaccaaaatcttctattagttatagtgtgtcagtaatggagtatcaggtggctctctttgatattctagaacaattaactctgtccaatagaaatataatagaagccatgtatgtaattttaaattttctagtggtcatgttcaaaaagtaaaaagaaacaggtgaaagtaattttaatactagtgtatctaaaatattatttcaacatgtatttagcataaaatattagtgagataatttacattctttttttggtattaagtcttcaaattttcatgtgtattttacacttatagcacagtgtaatttgagctacagtagactcactttaaatgctcagtaaccacaagtggctagtggccactgtactggacagtgcattttttttttttttttttttttgagacggagtttcgctcttgttgtggcgcgatctcagctcaccgcaacctctgcttcctgggttcaagcaattctcctgcctcagcctcccgagtagctgggattacaggtgcccgccaccacgcctggctaatttttttgtatttttagtagagacagggtttctccatgttggtcaggcctcccaaagtgttgggattacaggcgtgagccaccgtgccaggcctggacagcgcatttctaagtggaccagaatattgcttgcaaataatgaaattttttctctaaaatttttttggtctttttttcttttgtcttaatgtttttgcttgggcattagtagtaccatgctgatgttgatgatattaatgggaatacttacaatgtttgaccactatgaatttttggctagaggtttccttccctttctagtttgtaagaatttttctttaaatcagaaactaattttaagtttaaaatatatatatatttaaatatatatatgaaaatgtggaaactctcgagatgaccatattttttattttaaaaaatagaaataatacttttaaaatggtgaacaattcttgtactttagaaacaaagcctcttgatcataatgcatttattattattattattttttgagatgagtctcactctgttgcccagcctggagtggagtggcatgatctcagctcactgcaacctctgcttcccaggttcaagctattcttttgcctcagccaagtagctgggactacaggcgcctgccatcacacctggctattttttatatttttagtagagatggggtttcaccatgttggttaggctggtctcgaagtcctgacctcttggtccacctgccttggcctctcaaagtgctgggattacaggtgtgtgccactgcacccggcttgcattaattttttttagcaaatttttctactaaatttcattcacttttttacaaaatttaggttacctaatcataaaaatctctatttctctattttgttgtaaatacagtcaatctttgtccagtttttatagcaaggattttctggccttgtgaaatgtatagacatgattcttgttctacactttggaactgctcattaccatattgtattatattacacagaatactttacagaaatacattcatctcattggtggcagcacatcctaacagggtgttttcctccccagcaggactctggactgtcttcacactaggtggtgtgggcagcaaagcggctgcctctccagagctttcttcccctctggccaaccagagtctcctgcttctgctggtgttggccaatctgacagatgcctcagatgcgccaaacccctacagacaagccattatgtccttcaagaacacacaaggtttgtggtattttttctctaatattctttgtaatggggagagtattgcttgttctatattgtttattgtcttatagttttggagatgagtgtccattgtatgttttcatattggtcaaacatgagaaaaactttagcttttcctgtcaatattatcaggaaggtcaagcatcctttatatctgatcctttatatctgtttaaatccatatttctttcatggacaaccaaccagcatgtgtttaatttgggtcagtctgtactacctgttagggataggaattaacctggaaaacccaaatgctaggttgttttaaattttcagttaaagtctgtgttctagagttttatagaactaaaaattaggtctcaaaaacaaaaaaaaaagattagaacacaaatcagaaaacctttttctgtagagggtagtggctttgtggagtcacatggtctctcctgcagtctgttagccttgccgtttttccatcaaagcagccataggtactatgtaaacaagttagatggctgtgctccagtaaatctttacttccagacaaggggcaggctgcccatgagctgtgtaacttggtattaataactcctaaagtagaaggtgagcatatggcttcatgttgaaccagtattatctcttctcaaaaggttacattctaaaagcaagattcctgtagtatagtcaagtgctgctcaacagcagggctgtgttccattaggcaattttgtcgctgtgtgaatatcatagtgtacttagacaaacctagatggcgtagctactacacaactaggctatgtggtgtagcctattgctcctagccaacagacctattcaacatgatgatgtactgaatgctgtagtcagttgtaacacagtggtaagtatttgtgtatctaagcagtctaaacctagaaaaggtacaataaaaacgtggtattataatcacatggaatcactttgaatatgtggtttatcactgactgaaacgttattatgcagtgcatgaccagatgctcaagacattttgaacactaatgtaatgaagatgggtgggaagtacagtgattggatgggagcatttgtaagccttctgatgggctgtgccatgattcttccgggttattctgatacacatttcttatagacgtggctaaatgtgcccattaattgcgcctctgccaattctggtattatttgcagtgtgtctttgtccatttgtgctgctctaacaaaatacctgagactcaataacttataaagaacagaaatctatttctcacagttctgaaggctgggaagtcaatctaagatgcaggcaccggcaggtttggtgtctggtgagggctcagtctctgcttccaagatggatccttctagctgtgtcttcacatggcagaagggagtcaagggctaaaagggctgaatgctatgtgggccctcttttatgaaggccttcatcctattgatgagagatgggcccttaggacctaatcacactgtaaaggccctacctctcaactttatttcattggagattaaatttcaacatgaattttggagaggatacaggcaaactataacacaggacaatagggaattaataacaattttacaaattaaaaaacgaaaactggtgtatctgttagtatttttctgttcccattacttactcttcttggtgacagtatggcttaatggttaagaaagcaagtttcagagtcaagcatacctggcttcacaccatacctctatcgcttcagagtgtgagacctttgacagtttgcttaatctcaattagcttcaaaagcttggcctataaaatagagataatatcacctaatagtatttgtataaagaccaagcaaggtaagtctttaaaatgattagcccagattttgcaacaaagcaggtattcagtatatggtatctactatgttactcttgttgctcaggccaaatgttggtatttagggctgaactttgcttgggatggtcatggtttgggagaccatgtagtacaatgaagcaaaatgttggcttaagggtattcatatccatcagggctgatcttggcaaagttacttaatccctttaaacatttattacattccatgtaaagctgatcagaataatgacatgtttgatgtatgggttaaataagggataacacaaacaaagtgtttagtataacagctggttcatagcatttattagctagtaatgtatatatgttgtggatacatatacacaacccacatattccctttgcagtcaggtataatacaggttggtgaatttgttactttccttcaattttaaagaagtgtagtgtgtctagaatcttcctccagtgaacattctgtagattccataatatctgcatactcacagcacatggcaacacttccttttgccatcccttgcaaaaatataaagccaaccacaaaaaaaaggaattatttttgtaagtgtcaaaaatacagtgttagtattgaaaaaatagtctatatttcaaatgtggaaggaaaagtgagggcactggatagtaaacctgaaggcattttggtgcattcccctcacaaatgtaaagcttaggaaggagaatctgagaggcaaggattgtgttggaacacatctctttttccataagagcacagcttttagaaatgttaaagcaagttgttttgttttggtagtgcttctgtgttttaaaggcttaaaaataatttggtgctttttagaacgtaaaaatattagctctttgtgctaccatgttcagagttttatttgattggatgatgactttctctgagtccattgaacttatctttatcttctttgttgcttcctaaccttggttgcttcagtttctcagcaaatccagttaactgttggaaaggggctgtgtcagattggaatatcaagaacttttcctaatacaggctgtgatttgttcttttcattgttccagtgactgtactttaaaaaaaaaaaaagtttcttaacagttatagtcaattaggtttgcattggagattatattttattttattttaaaaaaagttatagaagttttctggtagttgtctcaagcttggtgtgctcttttgattatagaacctaatgttgaatatacacagatggcccccaacctgcaatggctggacttaggattttttgactttatgatgtgcaaaaacaatataaattcagtactgtatttgataaattacatgagatattcaacactttgttgtaaaataggcctactgttacagttggattgatacaatttagaactgtacacaaatataatagcttaggctaggctagactacactatgttgtttggtaagttaggtgtattaaatgcattttcaacttagaatattttcaacttatgattaatttatgggaatatgactccattgttaagttgaggaacgtctatactgattttgatataagtggatgcttcagccacaatttatttaaaggcagtttttttctttttaattctatcttaaaagagaattttctattttgtgtagaaattatatctttttctgtagatattttttatttaggactcatggttatttagttttggtaacaaagtattttatctcaacgtcctggttaagttgtattgattggtgggccttttgcctagctcataattctgtttatttaagttcatgttcttatagctgatttatttcagctatgttaatgggaaaatagtaacaaagtcaaagtatatgactttgtttagttctttttaaagtaaaatttttgttttgttttgttttagacagagtctcactctcgcccaggctgaagtgcagtggcgtgagctcggctcactgcaacctccacctcccaggttcaagcgattctcctgctatagcctcctgagtagctgggattacaggcccacgccaccatgcctggctaatttctgtatttttagtagagatggggtttcaccatgttggtcagcctggtctcaaacttctgacctcatgatccacctgtctcggcctcccaaagtgctgggattacaggcgtgagccgccatgcctggccctaaagtaaattttacataaattaaaattttgaatctgaaatgtagtgactttccataaaattaatgggaattgagttgtacacattactttaacaatatttttatttatataaagcacagctagaaattactgatgtgctgttttctgtattccagatagcagtcctttcccctcatcaattccacatgccttccagatcaactttaatagtttgtacacagctctttgtgaacagcagacatctgatcaagcaactctcctcttgtataccttgctccatcaaaatagtaatattagaacatacatgttggctcgcacagatatggaaaatcttgtaagtatcatactaaacattccatgcgtttgtatttttttttaattatactttaagttttagggtacatggcacagcgtgcaggttagttacatatgtatacatgtgccatgttggtgtgctgcacccaggaactcgtcatttaacattaggtatatcgccaaatgctatcccttccccctgcccccactccacaacaggccccagtgtgtgatgttccccttcctgtgtccatgtattctcattgttcagttcccacctatgagtgagaacatgcagtgtctggttttttgtccttgggatagttcgctgagaatgatggtttccagcttcatccatgtccctacaaaggacacgaacccatccttttttatggctgcatagtattccatggtgtatatgtgccacattttcttaatccagtctatcattgttggacatttggcttggttccaagtctttgctgttgtgaatagtactgccataaacatgcgtgtgcatgtgtctttatagcagcatgatttataatcctttgggtttatacccagtaatgggatggctgggtcaaatggtatttctagttctagatccctgaggaattgccacactgacttccacaatggttgaactagtttacagtcccaccaacagtgtaaaagtgttcctatttctccacatcctctccagcacctgttgtttcctgactgtttaatgatcaccactctaactggtgtgagatggtatctcattgaggttttgatttgcatttctctgatggccagtgatgatgagcattttttcatgtgtcttttggctgcataaatgtcttcttttgagaagtgtctgttcatatccttctcccactttttgatggggttgtttgtttttttcttgtaactttgttggagttcattgcagattctggatattagccctttgtcagatgagtagattgcaaaaattttctcccattctgtaggttgcctgttcactccgatggtagtttcttttgctgtgcagaagctctttagtttaattagatcccatttgtcaattttggcttttgttgccattgcttttggtgttttagacatgaagtccttgcctatgcctatgtcctgaatggtattgcctaggttttcttctagggtttttatggttttaggtctaacattccatgtgtttgtattttataatattttggagaaaaacttcttttcccaagagggcaaatttatttgcctggttgccacaaaggtgatggtcaagaattgatagggagatgtcaccagacacagacggagggtaggagcttctccagcataagacacagctcatgtggaggtggcctcccagagcaggacaccgcagcgtccctggctggcttgacagcatccctccctgtccttatagtctttaacagccacacgttgcccaggattcagcctgttcaggtcttccaaaaatctcaaggagatttttaaatcatctcggtcgctgccatctgctaagtacccgcccaccaagttcatgttactcgtcacagttgcagaatattcctgatgagaatgctgaaaggaaaatgatgtttcaactcagctgcccaaatatcccacccactctggcaggcttaggctttaggactgtctgaactcactccctggagtctcatagtcattttaaggtacctttgtcagatatcacttaaattacactatccatcactacatgagtgaaattagttctcaaatttttgttcatagacaaaaactcctgtaagcaataattgatttcctttatgactaatgtgcaaacatcagtgtttctataaggggcaaagtaagctacctcaccaaggtgttaatgttgtttgaaatacatagtatgtagataactatggacccttaatacattcataaaaatgtgaacattccggaaatagccagtagctggctgacagcaatgaaatgttccctctgtaccagtttttacaggttgatagcaggattctcccagtatttggttaccattttttcagtgttaaatataaaatactgcataaatagtgaagaaacatggaatactagaattcattgaatgtattctacatcagattgacactaagaacaaaaagtgtggtgaaagtgtctccacatcaggtctaggtgggaaacactgcttaaatagcaaattgagtatgaaagtatgctgcttatatgagtaaaatcctataaagagaaggcttgtttcctgatgggtgtggataggcatagagacaattctgagtatgttgtattctaagggaaacgttggcaataagcaggaaacctgtgacatcacctgtttcagaaagttgtatggtaaggatgcaggtatataagatggtgcagagagcagctgtctgcgtttgatgacatacccggtgaaaggttaaaaggttttgtgttgtagtttttttggagggtggtgtttgtttatttgttctggttttgttggataatttcttaatttatgctccatctgtccttttacctttcttctataataaatatgttgaggctctgattagaaaatatgttatcagtaggaaatttactgtgctgatctgattttgttgtagttatcaattcttttattctgcagtctttgacattaagaaggtaatgtttaacagattacagtgtttctaagaaataccttattgtgtgtaaatcccataaggctggaggcagacctgcctgtattcagcgacaggtgttggctaacttggattctttctattgatggtctgactcactactgtttgacttgttttaactcaaaacaagttaattaatctggtataacttcttatagtacatttttagttggtatctattagaataacaatacagtgactcttacattttctttttgtgtctctgaatagtgtctagggcgaatccaagtgcctaaatattaagaacagggcataagagggcatactttttagaaaaacccattagggacatgaacacaatttttatattttatcacaattaaatgtttaccaagaaaagcagctagacatttgagatggtcatgattcttttagttgtaacagacccattgcttatgcctagcataagagaaaagaaatatatctgtacaaatgaaaaatttgtgctttttttttggcttcagtcatagctggttctaggggctgaatgatgttatccaggcttggcctctccatcttttgcctctgccttttatagctttggccttattctcaggcacacactttccaagtggggaggcaggtggccaccagcagctctcaacatatcataagctaaaaggaggaaacacagctacttcagaaatatttcatgaagggctccaatagtctcttcttgggttgtgtatccacttatttgaccaatgactatgggaggaggcacacttaatgctaagccaccatagccacaaaggtaaagggaagttccttaaggaagggatcttggacaaataatatatagtcacttcaacactatattgcttgtaactttcttaatcagggcattgtgagttagtcactcttttaatttctgtttgtattagtccaacagagattcggctggtatttcccttaggcctccagcagtcttctgcttttgggtcaagccttgagcctgcacaatatcgcagatatgcaacccctgtcattttgatatcgtactcatttgaaacttcactgaagagacacttagaaaatgagattaatatttacagtgatatgcagtctatgatttatcattaattataaaagaaatgacataggatctttatatcttgttttagatggactaatagtcctttattttctgaatgtggtttttatataaacatcaaaaaggaaaatttttttttagctcttttgttttcatgctaagtttcttgaaagctacattctttgcctttacttcttatgcacttttctacctgttgtgatctaacatctgttcctacaacttcctcatcagcagctcctgattattagtaaatctctgggcatgtttcataattttcttatttgactgcattgctgcatgacactgttcatctctttattctttaaaccgccaaatacctatgtcttagtcagttctggcttagtcagttcagaatttagtctggcctgactgctttaacaaacataccatagactggtgcttaaacaacagaaagttatttctcgtagttctgtaggctgggatttctaagatagagatgtcagcccccttggagtctggtgcagacctgcttactggtttgtcaatagtcatatacttgctgtgttctcacatggcagtgagcagaggcagagaagaagcaagctgtctcctatctcttataagggtactaatcccgtcatgagggctccacccctgttacctaatctcctcccaagggccccacctcttaatagtgtcccattgtgggttagggttttaacatactaattttgggggcccaaacgtgcagttcgtatatctacaaacatataccttggctttccaatcattgtactctgctggtttttccacctctatgcctactgcttttctctctcttttatgtgttatttttccttgtccttaaatgtgtcctgctgcaggattctgtcctttttgttttttccctgtacttctccctaaaacatctaagcaaattcagttgccatttatatgttgccagtgtatatgttcccatttatatgtgccatatatgttcagttctgtatttgcagtcctgattacctgtatctcatatccatgtatccagctgccccagacatttcccagtggccgtctcatagacaccttaaaccaaacatgtaaaaattgggttcattattttccctgctcttccttctcttactcctgtattctctgtcacagggagccatccatagagttggcaaaagctttgactcctctgtctcattcccccatatccaaccaaatattttttattttctctccttattatctttggaatgtattagtgttctttttcctcattgcgattcctttggtctaagctgccttcatctcttactaaaattattgcaacatctttaactggttttcctgctttctgacttgctattctttaatattttttatcctgtttccagagtgagtatattagagtcaaatctgatcatgtcacttccctacttttaaagccctttcatgtctccacagtgccctcaggttaaagctcttactcttaacgtggctaacaagacactttataattttgccacagcttccattttgggtctcatctctttgccattatgttctttttattctttatttaatcataatgaattaatttaatgtctctcaatctgacctatctcctaactttagacttggtttttctctctagaatacttctccttgaaattttctcctttttcctcttctcagataactcctagtagtttttcagatctcagtttagatagttctttcagaattaaagtgctattataaaagtaattatataccatatccaagtgggatttatcccagaaatgtaagcttgattggacatctgaaagtcagttattgtgatacatcatatcaacagagcaaaaaacaaaaatcatatgattatttaaatagatacagaaaaaagcatttgacaaagtaatcacttttttatgaaataaaaatatttaacaaactaggaatagaagggaacttccttagatgagtaaagggcttctatgaaaaccccacagctcacatcatacttaatggtaaaacactgttttctttctccccgagatcagccacaaaacaaggatgtctgcttttgccatttcattcaacattttactggagattctagcctgggcatttgattaagagaaagaaattaaacatatctagattggaaagcaaggtgtaaaattatctgtatttgcagatgacattatcttatatatagataatcctaaggaatccactaaaaaactcttagaattaatagatgagttcagcaaagttgcaggatactggatcagtataaaaagtcaatatgcaaaaaatagtatttttatatatgagaaatcccaaaatgaagttaagaaaatagttctgttcataatagcatcagaaatttaacaaaagaagtacaaaacttacactgtgaaaactacaaaatattattgaaagaaatggggaaacacatattcattgattgcaacataaaaaaaatagagatagagatagggtcttgctatgttgcccaggctggtcttaaacttctggcctcaagcaatcctcccacattggcctcctaaagtgctgggattacaggcatgagccaccatacccagccctgatcacagtacttcacattgttaagatggcagtattccccagactgacatacacattgagcacaatacctattagaatcctagttgacttctttatagagattgacaagatgattaaaaaattcatgtaaaattacaaaggtccaagaatagccaaaacaatcctgaaaaagaacaaatttggaggactcatactttctaatttcaaaacttactataaagcaacactaatcaatacagtgtggtactggcacaaggatagacataatacatcaatggagttgaattgagagtctagaaataaacccatatacctatcatcaactgatttttagccagggtgccaagaccaatgtggaaagaataggttttttcaacaaatggtactggtgccactgtgtagtcacttgcaaaggaataaagttgggcttttgcttcaccccatatacaaagttaattcaaaatgggtcaaagacctaaaaagagctaaaactataaacctcttagaagaaatgggggtaaatcttcatgaccttgaatttggcaaatgactgttagatataacaacaaaagcatgagcaatgaaagaaaaaacaggtaaattgaactgcatcaaaataaaaacgtttgtgcttcaaaggaccatcaagaaagtgaaaaaacagcccacaaaatgtgagaagatatttgcaaatcacttttctggtaaggaactgtatctatagtatgtaaagaactttttaaacccaatagtagaaggacaacccaattaaaaaatggatgaaagatctgagtaaacatttctgcaaggaagatatacaaatagctagtaatacacccatgaaaaaaacaacttgacattattagtcatcaggtaagtgtaaatcaaaatcacagcgaaataccactttactcccactgtgatgcctagaataaaatgttagataataagaagtgaggatgtggagaaatctaatctctcatacactgttggtggaaatgtaatatgatgcaatggctttgaaacagtctggtagttcctgaaacaatgaaacagttaccatatgatccagcaattccaaggctagatatatacccaagagaaatgagtatatgtctgcaggaaaacttgtaaatgaatgtttatagaagcattgttcataatagcaaaaaagtggaaacagttcaaatgctagtcaacagaagaatggataaatgaaatgtggtatgtttatgcaatgagatattatttgacataaaaaggaatgagatcctgatacatactgcagcatggatgaactttggtaacatgttcagtgaaagaaagtcacaaaaatctacatagtgtatgattctattcatacggaagtccagaatagggaaattatagagacagaaagtggttcctttgggcagggtagataggggtctgggggaggtgatagttaaagggtatggggtttgtttttgagataatgaaatttttcaagttgcctgtggtgatggttacacatatttctgagtatatggtaaaccattgaattgtgcactttgaatggattgtatggtctgtaaattgtatctgaatacaaatatttaaaagaatgaagtactattctgacatagtctcattggacccgttacttactcttacattattatttctttgaatataccatttgcttgtgtgtcttgtcaatattttcagtactctattggtattatgtactataggtaagatgtgctttctacaggcgtagccaaaaaaaaaaaaaaaggcataaaatatacagtcacatgttgcttaatgtggggaggcgttctgagaaatgttttattaggtgattttgtcattgtgcaaatatcatagcatgtacttacacaaacctagatcgtagagcctaactacacacctaagctttatggtgtagcctatggctcctaggccataaacctgtacatcatgttaccgtactaaatactgcaggcacttgtaacacaatggcgtttgtgtatctaaacatagaaagggtacagtaaaaatatgatgttgtaatcttatgagacaatacaaccacagactgttatatatgtggtctgttgttaatggaaatgttatgtggcatattgaaaactccagaatcagaattaacaaatgttgagttaaatgactaaaaaatgtaactatgcttactaggtaatgtggaatgtgagtacaatgtattatgtttgacaaaatgtcagaaggaactccgaagacaagaatgcctgggaaaagagacagagcaatgactgcttggtaactggtatacttcgttcctggaagttaatagtgctcatgcactgaacttcataatttagaggaagttttagctacaacttgtaaaagaacaaaacataccagtgccacattttaaaagcttcctgcaataggtgtgcctgtcaaaacacgtatgccccaggcataccagcttgttttggtgggctttgcataccagcctgtgctttaaggacttgtatgtgtaaacaatttgctcattacatgtgttgtctgatttagatgatagatttttttttttgcctgttttctagcattcagtggatagtgttcatggttgtttccaacaagacatgctatgtagatagtctgcccatctttaataaataatttcagtaacctccttactttagtgaagaaggaacaaattgaaggtgtcaatgatttgaaataagcacaatggtaaacagcattatgaaatgaaatgtttgatagatatactgaagagcagatcttaatacacatgttgagaaaatgcaccttgggttccaagagtctaattacatatttatttaaaatatatttcttgaaatatattttttacttactagctttaaaaaggtggtgctaagcacataaattaaaaagttaacttctgagcagctgtgctctccccgctactcccactttttggttaagttgggagaaggcaatgtgacttcttaaaatcttcaaaacaaacaacgagcctaaatggtccttgcagatccaacctttatgttggttagaccttaagagaccttcacagagttagtggtgattttctccactggcatcttagctatacatttggaaaatacattcagtcagaagtgggtttatatggttttttctctaatgaaaaatataactgatattaaagcaaagagcacaaaatgaaagtgtaaagatttaaaacatttggatttataatgaagtattgaaatagtcaattataatttttattctctaggttttaccaattcttgagattctgtatcatgttgaagaaaggaattcacaccatgtgtatatggcccttataatattgttgatccttacggaagatgatggcttcaacagatccattcatgaagtggtaagttaccattacttggattagagttagagttaacagaacagacatgtccctacgtaagatttactagtctttacatttctttctggtagatgttcctgtgagaacctgtattagaaatgttatgtctttcttcagatttatgaagcggtgcttttttttttttttttttccagaatgactattaaccactattaaaaactctctcaaaatggttctttggtaattgatacaaatgcttttgctgctactgggttcatttttcttcagcatttcatttccactttttcattgtggcagaaattgtcaaacaggtttgcttcatgcatacagaattagagaagaaaaagggaccaaaatggaagaagtttgagaaatccattgttttatatatatatttttaaagaacataacataatttaactttttaaattttggtcctgttggagagttttattcccaaactggtcttatgtttctctttggcatttttttattttattttttgcatcaaagtaatacacatatgtagttttaaaacttgtatagaagtacaaggttttaatgaaaaataacagacccatgttcaccctatttctgattcccactcctgtaaggcaaatgctttcagttctgtccatgtttcgaagtaacatacttatattgtgatttcttgatttttcagttgcagacattaactattatcgccctaagatggaagatagtcattggttcttcctgcattccacaagtgttccctctgggttcccagcacgcttgtcggcacacagactttttcctttttccatcttattaccatttttggttaactcagcttttacattattatttttgatgttatttttagttcagctgtgtactgtaggataattgcgtttcctttcttgaacatgttttaccatttctgtagcacatcattgccctgttttttatttgtgtactaatacactgattctacccccaatacttcaacagaactgaaaatttgctcaaaatatattcaaacttaccgaattttctttttggactcctgtctttcctggagcatctggtggccctggttgatctgttcatctgtaggagtaagcactaagaagtcgattggaagtcctgtgtgtgggcaggtcttacttactgtaccttgttgtacatagtctctttctctgggactgtgtccctgcaggccattttttgggtggattgtttttgattcttccagtctccttgctaggggttctataggagaagggggcagggctttcactctttataagggtacagacactttgttttctcctcattttcagtagggcttttatattatatttactcctctctaatgttcccttaagtcatgtttttgcctcttacatagtatgaccataatttcaactaagatttaaggaatcttgaccattgtggaaggagtataaaacatacaaatttattttttgtgtgtatatttaagttatacaacttgatgttttgatatattaatacatgtacatagagaaatggctactatagtcaggtaaattagcatatccatcatctcacatagttacctcctttattttttgtggcaagagcaatgatactctcctttggcaaaaatcctgaatacaatacagtatcattaactatagtcctcatattatacattagatctctagacttcatgccatatacctgtaactttgacctatatctcctcattttctcacatccaccccctggtacccattgtaatatcctctatctgtgtatttgactttttaaaaagataatccacatatatgtgagatcatgaagtatttttctttctctggtttatttcacttagaataatctcctctaggtttacctatgttgtgccaaatgtcagggtcttcttttttaaggctgaataatattcctttgtttatacaaccatgcactacttaacaattgggaagcattgtgagaaatgtgtccttaggcgattttatcattctgtgaacatcgtagagtgtgcttacacagccaagatagtgtagcctactacacgcctaggctgtgaggtatagcctgttgctgctggccacaaaccagtacagcgttgttactgtatactgtaagcagttgtaacacaatggtaagtatttgtttatctaaacatagaaaagctaccataaaaatacagtataaaagattttaaaaggcacacctgtatagggtaccatgaatggaacttgcaggactggaagtggcactgactgaatcaatgagtgagtggtgagtaaatgtgaaggaccaagacattactgtatgctatcgtagactttataaacactagacacttaggctacactaaatttataaaaatatttttctttaataatcaattacccttagcttactggaacttttttactttataaagtcaccacaaacacatgaataatgtgttgtgctacaatggctacaacatctaggtgataggaattttgtaataatcatctgggaccttctttgtatatgctgtctggcattgaccaaaacattgttatgtggcaaatgactgtatgtattacattttctttatccatttgtctgtcgacggactctctggctgtgtctgtcttggctattctgaatagtgctgcagtgaatgtgggagtgcagctatctttataggtggtgatttcattttccttatgcccagaagaggaattgtgagatgatacactagttctatttttaatttctttaagaatctatatactgtttctcaccttggtggctccaatctacatttccaccaacagtgtgtaagggttctgtttcctgcatcccctcccgtacttgttatctcttgtctttttcataatgactatccacactggtgtgatggttttgatttgcatttccctgattaattatcagggaaattttgagctcaaaatgtgattttgagcacattttcatatacttgttgaccatatttatgtctcttttggagaaatgtctattcaggtcctttgcccattttttaatgggattgtttttctgttattgagttgtgtgagttctttatatattttagatactagccctttatcagatatatggtttgaaaatattttatatcaattcagaggctgctttttcattttgttgattatttcctttggtgtgtagaagctttttagtttaatatagccccattaatttatttttgcttttgtagcttgaccttttgatgtgaacatagaaatttcttggttcttgttttcagtaaaatactatgagaagtaatattttcactgatgtaatcaactttttaaacatgacttttcttttaataaggaattaaaaacaaatatgatttttaaaaacatcttaaaattgaagtataacatgcatataaaacacacaaattttaaaggaaaactaatgaaaattacattctatatttgtgtcattaccacccagataattatttgcttcagcagcagcaataacaaaataatcagaacaagaaaaagtaactgtaaccacacaaaaaactttgaagcaaacatgacaaaatgttagtttttggcataattcatatgtggttatactttttattgtgctattttctatacttttctgtatcctcattctataattaaaacactttcaagttagcagagaattttgcattaaaattaaacttcgctgactgccaaaacagggttggtaagatagggaaagttcagttcacattgagttcagttccattggatttcaggatattttagatgacatttcaaattcaaatattgaaacacttgttctttttctctagaatctgactttcttgttgatctcgatttattttggtcccttccctttccatatgtaatagtagaaaagagtaaattcaaatgttttaccaagtttctctacatggaatcattagtgtgaacctaattgcctatgatatatatattgttatctcattttgatttgaatttgcatttcttaatacccaatgatacagagaatttatttttaatgtgctttttgtgtgcatatatatctttttgccattttttaaattatcttttttattttgaaataattgtagattcacatgcagttttaagaaaagtaagagagacctcatatacccttaatacagttttccccaatggcaactgtagttgtaaaactgtagttcaatatcacagtcaagatatttgatacttttgtttgtttgtttgtttgtttgtttgagacacagtctcgctttgtctcccaggccagagtgcagtggcaggatccagctcactgcaacctccgcctcgtgggttcaagtgattctcatgcctcagcctcccgagtagctgggactacaggcacacgccaccaggcctggctaatttttgtattttttattagagataggaatgtttcaccatgttggccaggctggtcttgaactcctgacctcgagtgatccagccgccttggcctcccaaagtgccaagattacaggtgtgagccaccatgcacagcctgacattgatactttttaaggtatagaatatttctatcaccacagaattatatccctcatcttgctcttgaatagccatacccccttttaaaaacttggcttatcttattattgagatgtaagaattttttattctggatcttttgcttttttatattctagtttgttaatgtgaattatactggttattgagaattatagtgattatttattgaatattaaatcaactttgcatcctggggtaaagtgcacttggacatgatatgtttttaaatgtattttcatatacagtatggttgagttttgaactttgtgttttctgaggaatttgtacatttcttttaaggtaaagaatctattacaataaaattgttcataatatactcttattacctcttctttttttttttaaaaaagttaccttttaatgtctgtactagccatagagagattacccttcattcttcatgctgataatgtgtctattctcttctttatctttctaactttttaaaaaagttaaaactttaaagaactagcttttgagtctattgattgtttttcctccattttttgttttctattttaattatttgtgctctttattatttcttttctcctgcttacttgagcctcaatttgccttttttttccccaacgtttcttaaggtagaagcttagacctttgattttacatccttctgcttttccactgtaagcaaaatatatgaaaatggttttcagactttggacaataggcagcacaggagagtaatgctagaaagaaaaaaatgtatttaacagtaattatttttaagaatttgaaaatacattaaagtcaaactttatcactaccacctaagatgtgaataccttgacgtaagacaaattattctactgttttagtgtaaatgatcatactcattcattaactagaattagaactattaacattaggtgaacatcattttcagaaaattttcttctttttatttaagttgagacagggtctcactcttgccacccatgctggagtgcagtggcacaatcgctgctcactgtagccttgacttcctggtctcaggtgatcctcctacctcagcttcctgagtagctgggactgcaggtgcatgccaccatgcccagctaatttttgttctgtggagatgggtttcgccatgttgcccaggctggtctcaaactcctggtctcaaatgatttgcctatctcagcctcccaaagtgctgtgattacaggtgtgagccaccataccagaccttcattatgcaatatattttttaatattattatatggtgaagaaaagagattttggaaagctaagatgttagaatcattgtttagttattttaaatccatgttgcagctgtagagagaaccagtgtatttcttagtgagaagcatgagaacattattaattccacacttcttttcatctctttcttccaattttttgttagtttaattatttaattttgtaaaaatttttttgagacagagtctcactctgttttacgcaattctcgtgcctcagcctcccaagtagctgggattacaagcaagtaccaccacacctggctaattattttttttagattattcaaaacttataacatttccattctgttttgtaactcaaattgccaaaattgcctaatactggttttattggatgtgttgtctaccatcagcccttttaccatagtttagtttctgtatccctgagtttgttatttttattcatcatcttctatatatctggcttttgttttcagtattttcttcacagaatatttctttttttttttttttttgagatggagttttgctcctgttgcccaggctggagtgcaatggcgcaatctcggctcaccacaacctctgcctcccaagttcaagcgattctcctgcctcagcctcccgagtagctgggattacaggcgcccgccaccacacccggctaattttgtattttaagtagagacagggtttctccatgttggtcaggctagtctcgaactcgcgacctcaggtgattcactggcctcagcctcccaaagtgctgggattacaggcgtgagccactgtgcctggccttcttcacagaatatttctgtggcatattttattcaccttctcatatttgaaactgtctgaaggttctcattttctctcccacacctccttccactatttagtcagaagaagaaacaaataaataaacctaccaaacttgtttctctctctagatttggggattttcatcagaattttcaggattttgtcaatttttccaaggggctgctgccaggtaaggcaggattcagtcacacatgtacttcttgagcctgctctcgggttttctcctttatcatccatcattgaccccagtacacctatgactgtgggcttgggctcatagaagcattttttttaccacatgttaccatgggacagcctgcgatttatagcacatatattgtttagtgagattgtttaaaggactgtatatactttgtccactcccacataggcttgagactagtatatttggtattactaatttggtaagcatttaatgagcatgaaccacctctcatacctgtggtaacggttaaatgaattttaagacacagtcacttttgtagtatagctcctagttttaacttgccaggtaagtcatgtgcttttattctgttctccagattatagaggtatggtagactttgaggatattaagtttgggctctagtctatttgttcaatgtactactcttctaaggcaaaactttaaaattgtgatttcacaatttctacctattaccatgtctagagatgtgacacatttattccttttgatatttctttctctttcctagccctcttcttgtcagatgtagatgtgcttatacgtaacacaaagtattcgatagaaaaatgggcaaagtaatagaaaaacagaatagagacccggaacagtaatcatcgttcaacccgatgcttcatcaggatcatgccaattaaagcaactgaaatattctgtgcctatcagagtagcaaaagtgacaaaatctgatatatcaagagttggtgatgtttttattactatggggttgatgaaagaaaaaagaattggtgaggatatagagaaaaaggactctcatatgctggtagtgggagtataaattggtagaaccactttagagaggaatttgtcctctcaaattcctcaaattgtatacagaaataaatactccacctctcagaagttccatttcagggtttacgttttagggagaacttcttcaaatatgttctcatgagaacatatttgaaagaattttcactgtagcattgttagttgtattcagaaattgaatacagctccattaatgggagagcagattacgtaaatgaaatattgtaaagcagctagaatgaatgcgtagagctacgtgtattgataataaaactcaaaaaaaaaaaaaaaacaacgcccatccaatttcaggatagtggctgcctctggggaggcaggttatcagtgtagaacaatgaggaggcttcaggtactttagaagcaagaatactaacatttaataaatctaggtgatggatacagtggtggtctctataccaggctaatcaatcaaactttctatcctcatagaagtcttctatgactgcactgtaagtatgctcacacctgaaatgtagctagtatggctgaggaatctattttacttttattaaattttaatttaaatatccacttgtggctagtgccactgtgttggacactgctgctctgtgctttttagtgtgttaacacagttaatagtaactactttttttttcttttttgagacagaatctcactctgttgcccacgctggagtgcagtggcacgatcttggcttggtgcaacctccacctcccaggttcaagcaattctctgcctctgcctctggagtagctgggattacaagtgcctgccaccaagcctggttagttttttttatttttagtagagacagggtttcaccatcttggccaggctggtcttgaactcctgacctcgtgatccacccacctcagcctcccaaagtgctgggattacaggcatgagccaccacgcccagcctatacatttatttttaaaagaagatattcaagccaggcgtggtggctcacgcctgtaatcccagcactttgggaggctgaggtgggcagatcacgtgaggtcaggagtttgagactagcctggcgaacatggggaaaccccatctctactaaaaatacaaaaattagcgagtgtgctggtgggtgcctgtaatcccagctactcaggaggccgaggcaggagaattacttgaacccaggaggcggaggttgcagtgagccgagatcgtgccattgcactccagcctggatgataagagtgaggctccaactcaaaaaaaaaaaagaagatattcaatgatttggcaattctgcttcctagtaaattctcgcagatgtacttatgaagtcatgtgcaggtatttttgttttcaaaatctgtgtgattcctgaactgaggtaaaagtctggatagtaagaatatggagagtcaggaattctttctttttttctgactttcatgtagtgagatttaggatagtgatctgaattgtaacattgttttaaataggaaaacaactgtaaatagcctaaatttccattaatagaggaatggatttttttaaaatgtagcctgctaatatagtactctagagtggttacaaggaatgaagtagacttggatatagaggtgacattcaaatgacttaagtagtatgtatggcaccaacaccagccagtaagaatggatgtggaccacagttctttgttctctgctgtatattacctgggggagtggcttacaacaaaagctatttactaactagtattgagtattccattttaaaaaaagaactagtactatcagacaggcatacctggtgaatattcttcttatatgtatcaatataggagggttacagaaacatgctgagtgaaaaaagtaagatgcgaacaaaccagatgtgtgttagtttcttagagctactgtaactgaccaccacagttactgagtactgctgatataaatgaaagatacttagtgtcttctagagttgtctgagtaccacagctaggtgactcctaacaatagaaatttattgtcttctgtagcctgaaagtccaaagtcaaggtgtcagcggggccatgctctctctgaaggctctaggggaagaccctttcttgtgtcatcctagcttctggtggtcgcaggcaatacttggtgtcccttggcttgccatctatctacatcactccagtctctgctactgtcatcacatccttctctcaggaggtgtctgtctctgtgtctgtcttcctcatcttacagtcaccagcagtcatactgacctagagtccacattaatctaatgcagtctcatcttgattatatttcaaagaccctctatccatgtaaggtcacattcacaagttttgaatgacatagatttggggggaaaccattcattctaatacattatgtatggtactatttatgtgtactagaaaacacacaaaggaatgctggtttttggttttttacatatatatgtaggtacatatatgtatatatgcagataaagtaattgaaatggtctagagtatacacactaaactcaagatagtgtttgttcctccatgggggaataaagtgagatatatatattaaaaaatattaacagttggtaatgtgaattgtgggcatatagatgtcaattgttttttgtactttcccaaacatatttaatttttttaaaagagttgatattatataatgttactgtataatactctatcatatataacttatggaatttatttttgagagagtcttctctgtcgtccaggctggagtgcagtcactgcaacctctgcctccctagttcaagcgattctcctgcctcagcctcccaagtagctgggattacaggtgcacgccacctcgcctggctaatttttagtagagacggggtttcaccatgttggccaggctggtctcaaactcctgacctcaggtgatccatccaccttggcctcccaaagtgctgggattacaggcgtgagcctccatgcccagccaaacttttatattttttacttttcaattctaaataatatttaaccaccatgtagtgagtatttgttatatgccagcctctgagtggagaatgcagtcagggtgggcttatttgtaatgggggatgctgggtgatgtggggccagagagttaaacgagtgaaaatatgtgtacggaagccacctgtatatacttgtactttcaaacatattgacatgaaattgagtgtggtattcctttgtgtttttattcttttaatctgtttctgtactcccttctcattcctaatattgtttggaatttttttgctgttgttagacttgctagagaatgatctattttaatcctcttttagtatattatttagatttaattctgttttcctgatttcatggatgactgttgtgtttgttgttgtttgtattccatattctccttctcttgaattcttctggatttgtcctgctgttactgtgttgaggaggggcagctaaatacttacatgtgttgtggtgttttgttttttttttttctcccggagatggtacatgggtggttcatgctgagtttattttgcatcatgcttatgtggtagtttctcaagatgcagaattctagaatcataatgccttccctcaaaaatcttgagacattgttctgctgtccttcagatgtgtagtgttcaagatgggaactctaacattagtctgcttctttttccgttggtggtaacatgttcttctgtctggaagccaatggaactttctcatatactgcaaattcattaatcttgcgagaatgttttgattgtttttcatgatttttttcttggaatgttgaatgtttttcttttcctctcaaagaaattttctcatattactaattgttctgtttttcttctagtttatttcttctggaatttttaagtggctatgacgtctgcacttttctcttatagtttctgtggagaacttctcagtttggtccttcacatcacaaatttaattttccatagtgctcactctgctacgcccaggctggagtgcagtggcaacatctcgtttcactacaaccttcgcctcctggcttcaagcgattctcatgcctctgcctccagagtagctgggactatataggcgtacactactacacccggctaattttttgtattcttagagagtcatcattgggccaggctggtcttgaactcctggccttggactcccaaagtgctgggaatacagacatcagccactgtgcccagctgccatgatacttttataatcttaagcgactttgcttttgttctgtgattttcccttttcatagcagtctcttcttattttatggatgcaatattctgtcaaatctcactagatatactaatcagaatttttttaaaaaattccagcttcctaaatcctctctctttaattagaggtctgtttgctctccctgttcagtttcacagtttattatttatttatttactttataaagtttttattatgaacactatgaaacttaaacataattggagaaaatagtagcatggatcttcatgtagtcgttattaacactgtgctgttcttatttcatctacccactttaccctcagcaccttttacgttttgatttctattttttaaaacaaatcttccgtataatttcatgtgtaaacattttagtgtgttctttcagtaagtatggactttaaaaaatatatcataccattagtacattcaataaaatcaacaataatgtttaaattcttcctaacaatttattatttccagttatctttaaaatatcttctagagttgatttgtttgaatcagattccaacgtctactgcatttagttcttaagactcacaaatctatagcactctctccctatcccagcttattttaccccttatttgttgaagaaactgggttatctgtttagtaggattccccgaatttgtctttagctgattatgtatcatcacggtatttaacgtgttctgtcctctgtatttcatgtgcactggtaattagaagagagtcttgatttggttcagcattatcactttcttaggttgaatgtcttcacttggtggttttgttattcatctgtagttataaacacaagtctaactaacttgttttgcaaggtggtgggttcccccctctgcatttgtgagtggtggggagtctgctgtactctgtggatgtgtgcctcttcttaagagagagggcaagaatcagcccagcagtctcttcctttttcatgcataggtagagaataatgtggcacagtgactctccttgagtcacggagaaaggttgcaggagtaaccttaacgaaagagaacattagggagttctagtgctcggctgagcctgttggtttgtttttttttttgttttttcccccattttacctctttctttggggcagcccagatttggctgctatgctgcccagtattcgcacctgtctgccggcctgcctgcctatctctctctctctctctctctctctctctctctctctctctctctctgtgtgtgtgtgtgtctctctgtgtgtgtgtgtgtgtgtgtgtgtgtgtgtgtgtgtgtctatgatccctaggttacaaatctacagtggaaatgtcttaacttagaaaacagttcttgcttacttaggcccggaggtgtgcgccagagctgcctactctccacagccatggcagagcactggagcatctctccttgaagatctggactcatttgcgtggcctctgtctgtgctgcttaactcaccttcagagcaaagtcatcgtttatcaaaaattgtggacatggagtaattcttttgtctgtaaagcaatcattttttacttaaacttttcttccccattacagatactaaaaaatattacttggtattcagaacgagttttaactgaaatctccttggggagtctcctgatcctggtggtaataagaaccattcaatacaacatgactaggacacgagtaagtattccagctgctattctatcttttttgcatacagtacaattaagacgatagtttaaagcaatcccaatttttaggatgctaaaattctcgtgacatatggtagaaaataccggtcactgtatagtcactgtattacatgatcctaatgtaacataaggtcttaatatttaatggcttgtatgattggagatattttacatgaaatagaaaacaagcaatgcaaaacatttagataaaagctattgtatgtctttatttggccagtaacactgatttgccttttttaatagcagcaaataacaaagtacaagaggatatgagcacaagaaaatatgaattaaaatgaaaaagaaaggtagaagagagaatattttaaagagtaaaagaaaaatttctgctggattctcttcacagtacctgggagcaaatttcagttctggttaatagaaatatattattaaagagaagcagtgtacagaattcatagctaagagaaatggcatttttttttttttgagctacgattgtgccactgcccttcagcctaggctgcacaggagtgcagtggcacaatcatagctcactgtaacctccaacccctgggcttaagtgatcctcttgcctcagtctcctgagcagctaggaccacaggcatgtgccactacacctgactaattttttttttttttttaaatagccaaagtctcgctatgttgcccaggctggtcttgaattggttttgaactcttgtcctgaagtgatcctcccactttggcctcccaaagtgttgggattacaggcgtgagcccctactcccagcccattttcagttattttcctccgtggggctattgcagatacacattcatgttttttatctgaaaccctaggagccagctatgttttagaaagcagaagtttttggattttagaaagataattatagtttatatactctactatgtgtaaccattagggccttaagtagcatgctgtaattaaacgttatatttctgtagcaaaatatttcaatattcaccatggagggaataatgaagactgtcaggaacatcatcattttttgtgttgtggaaaaaactttgaattttcagtgctttatggatttaggaattagaaaaaagagatagtggatctgaactttctaaaatcagtgacaactgagtttacatttgcttctattaatagttaaccttggttaaaatatagagaagacttgattgtatgttttacacccgctgtttcctcacaggacaagtaccttcacacaaattgtttggcagctttagcaaatatgtcggcacagtttcgttctctccatcagtatgctgcccagaggatcatcaggtaaatatgaactttaaaagaaatactgatttgcctctggctgagctattaagatggatactatggtggttcctttttaaatgttacctgtgaggactatcaaattttcctacttaatttttatcaccttcttgtttggttgaaaatagctcgttccattttgttttctaacctaactttttgatcaaagttaattgtatttacattcaatctttttataaaatgtaattttaagtgtaatgttagttttttagaggagcaggtatatttcttagtaatgcaaattaaatatgaatgtatttgatgcgcattttatagagcatcacactacacttttaaggatttatctgtgtgcgttttagagaatttttatagcagttcacccgtgtattagtttcctattgttgccataacaaattaccaaaaattagtggctgaaagcgcaaactggtcattttaaaattctctagtttagaagtccactgtgggtctcactaggctaaaattgaaacagagctgcatttctgtctggaggctgtaaaggagaatctgtttccatgcctcttctaggtgttggaggctgcctgcattccttggctcatggccccttcctctgttatcaaagccagcaacagtagattgttgagtccttctcatacctcatcactctgacctcctcttgtggttccctcttccatgttgaggactcttgtgatttcctggacccttcctgatccaggattatcttccatctcaaagtcagaatcataatcacaaggtcgcttttgccatgtaaggtaacattcataagtccaggggattaggacatggacatttttgagggagccattattctgtctgccagaaacccttgtctcttccccacccattgccaaagacatgacttttttttttttttttttttgagatggagtctcgctctgtcacccaggatggagtgccgtggtgcgatctcagctcactgcaagctccacctcctgggttcacgtcattctcctgcctcagcctcccgagtagctgggactacaggtgcccgccaccacacccggctaatttttttttgtatttttagtagagatggggtttcaccctgtaaagacatgactttgaaggataggaaagctaactaaccagtcataagtgaatatcattgcagggctttttagcatatgggggtacttttttgacttcctgtaggatgttcagtgttgtccaagtaggtctcaaatagaaccccagtgaagtcatattgtttcctttaattcttacttttggggcaatgcagggtttctcttcttcttttttttttttttttgagacagagtctcactctgtcacccaggctggagtgcagtggtgtgatcttggctcgctgcaacctccacctcctgggttcaagtgattctcctgcctcagcctcctgggtaactggaattacaggcacgcgccaccacgcctggctaatttttgtatttttagtagagacagggtttcaccatgttggtcaggttggtctcaaactcctaacctcatgatccgcccaccttgtctcccaaagtgctgggattacaggcatgagccactgcgcccaggcttttcttgtttttttaaagacagggtttcactctgtcaaccaggctggagtgcagtggagcaaccacagctcactgaaagctcaaactcctgggctcaagggatcctcctgcctcagtctgggcatgtggttttgaccattcagttttgtttagcagtcattggtggtgataacaactccgtatcacttttaaatgctgatctcacattctcttcattggttagccattgattgacctgggctcatttttaacttactcaaaattaagttgtctgtttatcttcagaatttagtacaggatattttgcattgactcactatttaatttatgtctggtcttaatacattctattagattgttttttgggtttgtacttgagagatcatctagttgactgacattggaataatgtgaacttcacgatttaaaataaacatagcagtctcctcctaccttggagtttttcaggtattctgaagagcctttagtttccaggagttaacctttgtcaccatgctttatttcaccataacagagttaatgatttctgtgctgctttgtaggctgtttttctgtttatgtgcagttttataatggtttcatgaagatttcattacacaattaacttttctcaaatgataaatgaacatttagcttgtttgatatgaaaatgccaaattagctggttgataatttaagttctgataaaatacatttagcacgattaaatgtttttgagatgcaaacaattttctagttgggaaaaatgcatataaaaacactgtgtccaagttttaatctgtgatggcaaaagtagaaaataaaccaatcatatttgaagaaataagaaacatagtttagatttgtgatttgagagcatttagattgtttatcatcaataatgagtagtgctttacttcattttaatagattgttagttagcataatatgaataacgaactatgttaagcaatgcaagaagtatcaaaataaataataaagtttcctgacctcaagcagcttgcaattcagtagcaggaataagaccaggacccatctatgtgtgtatatatatatatatatatatatgatacaaggatcttttatacagcagaatgttatatgaaatatatattattatatcttaatattacaatgaaagaaaaattgctatggagggggtgaatggctggttccaagaatggcaagaaggcttctcattgaaagattaagcagggtggctacagaaagatgacatgatagataagagaaactggcctgatacagcaatcatcaactacaacaaaccaaagcaaaacaagagagggactatggtgagagagcatgatttatatgtagaaaataaccagtttcatggaactggcatgctgtggacctctatggggatcacaggtgagaggcctgaaagaaacagctggggctattactgtggaggggcttaagggttggactcacagtttagaataatcgaaaggaatggagagaaaagaaggtcttttcttaataacaacaaaaaagaaagtgtgattgaatgagtttttaagtggattttgaagaaaagaatttaaggtaaatttcttgagtcacctgtttgagcagatgatagtatcatggtctgtttgtcgcactgagggaagtgtagttctacccagctcccacatgctgccagcacttttcttgttcaaggaccacatttgagtagccggtgcggaccagagcatcgtgtcatgcaggagggagcttgttggaagtgcggagtgtaggtgtggcttttgacctactggatcagagtcttctttctaacaagatccccagatgatttgtatccacattaaagtttagaaaacacttttgagttttggcctggaaatcattatgtatttcctgagaaaatatttgtcttgagctggaaatgggggccagcttttttgtactttgaggaaactcatttcctactaaatatttgtgtttagggtatagaaatgtaaagtatgataagggatgcatgacaaaaactgtttagatacccagaagggttattacagcagtacaactcagaattcaccagatgctctagtaaccacttcaagtgagaagtaagcagttttcatatacatgattcctaaatcctcttttagaaagagactacacaattttatatttgtcagttgcaaaacttagaagagtcagtatttcacatgatcttcaacaaaatgcaaaacagataacatgttacattgctatgaaaggatgtggataaatctttgaaaagcctccttagctggacataaatgtaaggaatgattccttacagtacctaggctgttgctcatacttaatgaccatgtgccttctacagactcttggtgttctaggagaatcacagatctaatttgagttttgctcaactttgtaagtcttttggatatgccataagtgtgcatatttgctgcgttctttatttgggattatgaggttattgaatttcaagacatttataaagagtagattatatgcaaggcattgctttagattagaaagataccatttacttccagcccttaagactgtcccttattgtctctcatgtccctccactggctgtttcctctggcttctccttcaccctttgattaacaggtagttttctctagtatctcattctgtcttgttttcttctgtctttacacattttctctgggagatcacatatatgtctatgactttatctactgtcatttgtatactgaaaatcacctgataatggttaggctttgtgtccccacccaaaatctcatcttgaattgtaatcctcataatccccacatgtgaagggagagaacaggtggaagtaattaaatcatgggggcagtttccctcatgctgttctcattcatgatagtgagtctcaaaagacctgatggttttacaaggggctcttctcccttggctgtgccactcttctccctgccactttgtgaagaaggtgccgtgcttctccttcaccttccaccatgatgtaagtttcccgaggcctccccagctgtgctggactgtgagtcaatgaaacctcttaactttataaattacccagtctcaggcagttctttttttttttttttttttttttttttttttttttttttgaggcaagtctcactctgttggccaggctggagtgcagtggcacaatctcagcttactgcaacctccacctcccaggttcaagcaactctcctgcctcagcctcccaagtagctgggattacaggtaggtgcatgccaccatgcctggctaatttttgtatttttactagagatggggtttcaacatgttggcaaagctggtcttgaactcctggcctcaagtgatctgcccaccttagcctcccaaagtgctgggattacaggtgtgagccactgtgcaagcctcgggcagttctttatagcagcgtgagaactgactataacaccacccaaatctaaattcataatctagatctttctccttcactgtactggcagacagtacaatgtagaggataagcacatagcctctgaagccagactgccagggtttgagatctcagctccagaactttactacctatggaatcttggtgatgatgttctttaccttctctatgcagcagtttcccatctgtaagacgggagcggcagcagctgctatctcaaaggattatggtgaggatgaagtgcgttgacatttgtaacggcctcgcacataatttgccctgagtaagcattagctggctgagcaccaaccccactaggttcaccacctgggtatctcatgcttacttcagactttcattatgtttaaaactgaactcgttttcaaacctactcttccttttaaatcccctatcctaggtaatggccctcaccacagtcacctaaattgccaagccagttctgtaacttttctccctttctctcaaattctatcttactggaccctgaagttgtacctaactgccattgtaatttgcatgtatatgctcttctctttctccatggctgctgtcttggttcacatgtgtgtcgtcttcacccacactatgccagtagtctgactgggtctttttgcctccctactcacccctgcacactgctgtattcactggaaaagcaaatctcattgcttcttttgcttaaaaatattaaatggcttcctattgctatcaggttaaaaatctgacctgtgctcttcactgtgattttgccccccaggggacatttgacaatacgtggagattttattgttattgccagaagtgggaaagaggttgctactgacatctagtgggtagaggccagagatgttgctaaacattctacaatgcacactacagaccccacaagaaagcattacccaacgcagaatggcagtagtgtcaaggctgaggatccctttcttaaagtgacatagtctgggccctgccctttgcccttcgtcttcaattgccatttgccatatacccactgcttctgctttactgaatcattacagttccttgctctttcacagctatatcgctgaatctagataaatgtggtctggaactagaaaaaagttgaggcagttctttgtgtcacctctttttttctgtaggtttttctttttcaaccagcttcccacccctttattccatgtcttttatcttgaacctgcagtggcttcttcaacttgctgaggtctccccagttcagctcctaggccttttgtttggaccaagctgctgctaacatagttgtttcatattccccattcttcagattacaaagagaaagaacccatttggccctcttcatctcttcgtagcagcccatggatcactgtcagtttctggcctaggggctagttactggggctagaacaggaaggaaagacccaggaaaggagaaagctacatgttagaagatctggatatggttacctggcttctttcagaagtaggtgtgggaaagatagaacttccaagtcttacctgtccagtgtaggtacttacaacatactggcctggcctggagttgcaagtcctgttgcttaagcagagtaataattactggagataaaagacttattttatatttctttgcattactttacagagagttgctctctctaggcacacaatagacttttaataaatagttagtgactgattcttagaagatgggctggcatctggaatttaaacttagttctggcacccactattctgagacttcatgcaagttgattagcatctggctatattttgcagatgtctgctgccgcttgaaactagtgaagttgatgatctggtgtccataagatgctttagacagtgccagactctattgaaagctttctgggttttcacacctcttgagaataaagtaatacaaagtatagattaggttttaattaaaacaattttatgagagcaatacagttatttctgataaaatttaatcatgcaatttaagaactttaaaattctcaaatccatgacttatgctttcactttttctcacagccatcaggagtgagtatatacacttcagattttaagtgtatggttgtgcaacttccgtgtagtagtctcaagctggcattttatatgagttgccttttcctgccctgcactcatgatgacacatattttaatcacccagcatttttttgaagactacaaaacagaagttggttgttgaactacgtggtcagctcctctattttgggcaaataagatcttttagaccattcaggctcatggaattaaagaaagaaagacaatttgcccccagccttcatttaaataattctttaatagtaacttaccccaacaggcttcctcacttctgttcccactgaattaagttttcatgggtttttttctcaaacatgaaagggaatattaataagcaaattgacctatttgttgggatgaatttatattacacacacacacatgcacaattcaaatatgtaataacataatatatgattatgataattttagaaatattgccttattttttaaaaagtccatttaatgataaatttatacctgccatcctcagtgtctcaccacttatctctcttgtgttacatttaaggctagttgaagtctggaggtttagacagtcgagggtattgactcttcacagctggtaagtggctatcccaggtttgtccagatcaaaagcctggctcactccaagaatggcagaatactctttctgagagtgactcgctcaccatgggaccatggatccaaactcctgggattgatctggaacagacagttctctacaatctaaggtagccgtgcccttggtggtcattcagtttgctttcccctagccctgattccacctgcctcccaatctatctaagtacctaaagttatagtagcaaagacaggaaggtcttttccacttttttagaactgacatgtttgagacaggtatggatgtgttcaggtattacaatacatggtatgtggaaattatcctggaaaagagtgataagaactgtgtgtcttttagcctgagacaataatattttttatatctaatccttgatattaaactttatttttaatttaatacttatgaatgcctaccactgctgaagtcctctttaagatatgtttttattgcagacgaatgccatttgttgtatctagaaattaagtgttatagttggtttttttttttaaacttcgattttatttcaacctcatattattgttagcactgtagtcaggaaattatttctttagggaaggaattatctgatggtaagaattgtaatgaatggttcagttctgtttccaaaaccttgctgagttatttaacttatttttcatctcttgaatgagatatcatacctacttcatttgagtggtgtaagagttaatgatggcttgtaaagtcttgcatctctattttctctattatagtattataacatttttgagatattttgaatctaaaaataaatctggataacatctctacaaaagaatgtattggtctctgctaatattgcaagattctgattccctgcccgatggatttttgaattgcctatattccccaaatatttttctaacaaagaaaatgaagatctcactgaacatagatagaagtttttaataattgttttattgtagattggtaggagatctgagcaatggcttgcagtataaatacttctcttaaatgtatatgatttcattttttaaaagatagaattagcttgctcttgcccaatgcccaggcaataaaaaggttccagtttcttcattcctttggtctttgctgatccttgtttgatcttggcatagcagtaaccaggaaaggaaggaggaatgtttgtcttgaaaatctggcttcctgtatttcctacagccagtggtactttgaaggcagctaagtttttcagggaaatctggcttggtttgcttttttagtttagtcctttcttaaggagttacattgagaacatttagacagctcctctctgaaaatttataagtttccagtagaaaatggttacctattcaaaaaattgctagtattgtacaacagggtgtcttggcagacttgatgggacacaagaaaacttcataattggtttaatttcagtttagactgctggcacattcaaaatgtcagctttaaagaaacatgtcatatgtttatcagattgtttatttcttataagtaaagacctttgtggacaaaattgccacacagcaaattaaactttaaaataacttccatagagctttattgaatgtcaccatcatgttacagaggtaacttggtgtggttcaactttgtcctcttagccatgaattattaagcctccattcctgtttatttttatgaaggttgtaagatttttacctactttcaagctaacaagtttacctgctacagttttgtagattctggtaggacacccaagactcctgggtcaaggacaaaggacagtttgttattgtcctttttttatattttttatcataaattattactcgcagcagtagtaggagccagaatattcatttcttgtgtggttcccatacccacagggcaacatgacaagggccaggtgacacctgtaagtgcagtgggttgcaatacaggagcggaacccagagcttgggaatccccagtcttttatgatagccttcaagcacacctgcccaacctttgctttgaagggagacatctttaatgtatttgatagtaaactactctctgctctagagagagacaccatctctgtcttccaagtctgttcactctacaagcatccacgcagagatagcccggagcacaaggctgctaatgcctctgcttttaagatgtgcaaaacatgagagagtggggaattgtctcccaacactccttacctagttatgaatttctgttgccattggaaaaacctgtcactgtttcagtaaggtagccagttgatactgctctaggttttatctctcagttgctaatgcattgtatttaaatatcttagaagaagcaaaggatggaatggcctcattcctctttgctttgtacatgtgtcataatgaacctccaactcagatgtcagtgtcattaactccacctctaaagccttatttacaagtcataaaattatagacttagaaggacctttaaagatcatctaaggcaaatttccacattttacatatgggaatattaaaatctcgagttatgtgaccagtccaagtgaacactgttgcagaagcagacaaaaaaccaagtcatctaggttcatagcctagtatttttcccagaacagagagaaaagaggcacgctttctctctgtcttttacaaaattgtgatatttgatatgttataaaatgctaaggccagataagaaaaatagagtgacttaataaagcattttccttcttgatgaattgcatgtgtttcatggacttttaaaaagtaccttttccaagacaaagaaacagtgttgtgttaacaggagaaatgggaataaacaaaggtaaaaagatttaaagtggctcacgtgtccaatgtaaatacatactgaatcagatgttgcagagataggacaaacaagggaagagagaatgcttccttaggagagacaaggatagtttggaaaagctagctttaaaaaggtaggtagataactccctatcacaagtattgtgagttttccgagcatttacaatttgttcatttgttcaatgtccttcagtttcctcctttacaaactgggactactgtcctagggccactgtgaagactaaatgagttaatacatttaaagtgcttagaatggcatctgctgaatagcagtcacctatcgggggaaccagcccccaatatttcaatgtaggttcttttctatttttcctaagtgtcggctggtctgagaaataaagagaaagagcacaaagagaagaattttacagctgggccgccggggttgacatcacatatcggcaggttctgtgatacccacctgagctgcaaaaccagcaagtttttattagggattctaaaaggggagggggtgtacgaacagggagtaagtcacaaagatcacatgcttcaaagggcaataaaagatcacaaggcaaaggcaaaattagaattactgatgagggtctgtgtcccactgtgcacacattgtcttgataaacatcttaacaggaaatagggttcgagagcagagaaccagtctgattagaatttaccaggctggaatttcccaatgctagtaagcctgagggtactgcaggaaaccagggcgtatttcagtccttatctcaacggcataagacagacattcccagagtggccatctatatacctacccccaggaatgcattccttccccagggttgttccttgctgggaaaagaattcagcaatatttctcctactcgctttctgcaagaagaaaaatatggctctattctgcctgaccccacaggcagtcagaccttatggttatctttccttgttccctgaaaatcgctgttattctgttctttttcagggtgcactgatttcatactgttcaaatacatgttttacaaacattttgtacagttaacacaatcatcacagaatcccgaagtgacatacatcctcagcttacgaagatgacaggattaagagattaaagtaagacaggcataagaaattataaaagtattgattggggaagtgataaatgtccatgaaatcttcacaatttatgttcagagactgcagtaaagacaggcataagaaattataaaagtattaatttggggaagtaataaatgtccatgaaatcttcacaatttatgttcttctgctatggcttcagccagtccctctgttccgggtccctgatttcccgcaacagttacccagtaattatcaaaggaaaaagatcttccttgttagagggctcacagcaccatgtcttgttcttgatggtgcagtaggtatttgaatgaatgatgaaattctgatacttgaattgagctaaaacaaatggttaaaatctactggctctataggtaaggaggaaccagtgtgcctatagactaccttgtttttgggtttttttcttcttcttcttctgtgaagctggtatccgtcacacacatactggatcctatgcaatcggttatttgtgttatccaataatatgagtattatttatattttataatgaagaaactaaatgtcagagaagtagcttgtctatggacagtgacaacattggtatttaaacctacacctgtgctctgtctacaacaccttcctttgccagtgcttcttataagtgaagttttaaattaaaaacaagtaatttgtgtacttggtcgtttaatataacactttacttaggggcagttgttgccagtctttctaaacatgtgatccccctgttgacatgtttttaaaaactcattgactatctttcagtagttactgactgaaaagatttgagggtgaatagtgggggtcccagacaccctgtgacagatggtctaagcagcttttcccaatcggagttcatgagaaaatcaagtccagcggagaaccagttaagtgaggatttcctcagttctcccaaggagatagtcatacgtagcaaataccctctaaatgagtaggagagaagttagttgatgacaaaacttttgccttcttaggaatcctggtttaaaagatctgtgaggacttcggggtttgaggtccactggttaagaaaaattactataggaactcaatgtgacactcctcctgttaatgacttttttaaaaaaaaatctaaaatgtgcctgctttcttcattagtcaaacatgaagattatattgaagcgtaagagtatttgtctattctttactgaataaactttcatggacccattagtcctggaaattcagaagtatatacaactctgtcataacttactgcctgatatcgacataataatggtatctgagtacataagccaatcagagaccttcatagcattatgaacttccaatttaggatcactcagtattaaatgaatcactgagattctaagtatgttctctgaaaaactaaagagactggttctagcaatgattttttttttcttttttcttttttttttttttttgagacagagccttgctttgtcacccagactggaatgcagtggcatgatctctcagctcactgcaacctccacctcccaggttcaagcagttctcatgcctcagcttcacaagtagctgggattgcaggcacataccaccacaccttgataacttttgcatttttagtagagacagggatttacaatgttggccaggctggtctcgaactcctggcctcaagtgatccaccatccttggcctcccaaagtgctcatattacaagcgtgagccaccacgcccagccctaacaatgatttcttcgtggagtattttaaacaagagtaggtatttaggggacatataatcatttatcagatattttctgtgtggctaccatgtgtcagacatctccaggcattggcaattcacaccatagactcatgctgtcttcagagagcttattgtctagcaggctctgtgttttactgtgatgaaagtgggacccaggagaaggcagcccgctcacctgagtgtcacggaagccttaccagtgagatgattgatgcttgagttatatctgggaagaggagcaggtctcctcttttaaagtagcgaggaggcagctcttttctctgtccatctggctcttggccgttccctaagcttcctttagaaaccctaggtataggccgggtgcggtggctcacgcctgtaatcccagcactttgggaggccgagacgggtggatcacgaggtcaggagatcgagaccatcctggctaatacggtgaaaccccgtctctactaaaaatacaaaaaaatcagccgggcgtggtggcgggcgcctgtagtcccagctactcgggaggttgaggcaggagaatggcgtgaaccccagaggcggagcttgcagtgagccaagatggcgccactgcactccagcctgagcaactgagctagactccgtctcaaaaaacaaaaacaaacaaacaaaaataacgctagttataacttgacgtttttgggtgtacttccctttcagtgacctacagaagacgcaaaacttccttcatcgaacttgactcccacaaggtgatgaaaataaaccatgtattaaaatacaacccatctagaggctgtgtgtcaagctgaccttcatccaattttaatttgttttcttactcaggaaactttatttttcaatgtatattacagttataagatggttgaaatactcagattactttatgcatttttattgttattattattttttgagacggagtcttactctgtcacacaggctggagtgtagtggcacttcccactcagtgcaacctccgcctcccagtttcaagcgatcttcatgcctcagcctcccaagtagctgggactacaggcacacaccaccatgctcagctaatttttttgtatttttagtagagatggggtttcgccatgttggccaggctggtctcaaattcctgacttcaggtgatctgcctgcttcggcctcccaaagtgctgggattacacccgtgagccactgcacccagcccagattactttaaattagatcagcagttctcagccacagtggaatggtggggtggggtgagagcaagtggagtgtaactccaggcagcctgtctgactcatctttgcagaaagacgcctgaagaacatgtgtggtgcatgttgtagtgctgggaaaatggttgataactcgcagcgtagaaggtgacttatcgtagaaactgaatttgtacattattaacttaacgacagtcgaagcataattattatagaagcctcaaatgagtgatcagctttttcctttttaatttgaaaaattcgaaatatgtttgaagagaattatataatgaaactttagattgtcagcccctaccttcggcagatatcagttcttgacaaactatttcatttatttcccctcctttttctccctaccctggattatttggaagcaattcctgacatcatttcatctatcagaattgcattatgtaaagaggtacatttttatgaatatccatttattatttggtccctctacaagtggtggagagaaaaataaaatcaggttaccaccatcttccaaaacatggaaattagccatagttttggtccttagtcatttagaatctgattgagttcggggcttactctatcactcatattgctagtcagtgttatatggatgctgtcttatttaattataagtctagccatctataaggtacagaatttctgtttaataggtgaggaaactgagactcagactgaaacttagccaaggtcatgtagctaatagtgtggagctgaaattgaaatccaagtttgaccctagcgtagaaatgttctttttggcagacctgacattgataaagctgaaaaggataggcagacatcatctaccttatacctgcactcagattctcagttgtgagtgagtagaatgtccactatataaagtttctgtgcagtcttggatcacttctgtgcattgattctcgaagtgtgttctgtgggccacagagagtccatggagtctaagccttttataataagacatcatttgccatttccactgtgctgacatttgcatcaagggtacaatagcaaagttggggtaaaactgctgagaccttagcataaatcaagtggtgcctaactgtactagtactcactatattttccacaaccacacacacatttgtggtaaaataaaaaccatcttcactgaaaaatgtccttggcgaaatagtaaaaatgattagttgttataaatcttgacccttgagtacatctttttgatattttctgttgtaaaactagaagctcacataatgcacttctactccatactgggttccaatgattgtcttgaggaaaagcaggtgtgtgatagagttgtgagctgaactagccacttttctgatggaatagcatttttacacgaaagaacatgagacagtcttggcagagaggaaactgccagtgttggttgccaataaaaaaaattttcaagtcaaaattaaaatttcgaaaaacttatatttggcatcatgagtttgacaacttcctaataatttagacttttgttataacatcaatgatgttagtaaatatggattttaaaaactattatttgatgaaatgtgtcaacatttggaagatctgcataattcagtgaaccaatatctctcaaatgactaaaggggctttttcattaactgtattaatgttaacatgtaatgtgtttattattaaatttaaatgaattagtaaatatttaatattttctcagttttaatatctgtcagtataactgacatatgaaaaaattctttggggttctcattaatatttttaagagttgaaaggggccctgagaaaagtataagaaccagcactctaatgccctttcaggatgagataggtagagtggatgtgagcatgtctgtattacagagttcagtgtatatacttttaaatatctactatttctgaattataccttccttccatcagtataatcaatatttaactatatttgtattattcatgcttccatttaataaatatttattgagaacatagttatcagaggttgaaagagaaggggtatacagaatatataaatcatgtttattctctgtaagagctcatggtctctattctaaaaagtcataaaaaaacaatgttactgtactaaattgccttttaagtttattgcttatcttgcctgggtgtggttatgaaataaatttgttgctgttgtctatttctgtgtaacaaactaccccaaaacttagtggcttaaaacaacaatttgtaatgacctccacagggctttgggttgattgcttagctaactgactctctacttgtggtctcttgtttgccatcgtagagcagctgggctgggtgtccagtgtgctcccatctcaaggctggcagttgatgctagctgggagatctgttgaggtgttgcctggaacacctcagttcttcttcttgtgaccttgctatgaagcttggcctcctcaccgcaacgcaggcaggttcccaagaggggacatcccaagagtggcagaaactataaggtttcttatggcctagctcagctatccctgaatgttacattttattggtcaaaagcaggtcacgagaccagcccagattcaagaggaaagaaccacagaagggcataagtgctgggagatgtggttcatttgtggccatctttggatgctagctgccacaagactgctaggagactgttgaattaagttttataaattattgcttattgtagctgggaaaatgaatactttcattcttaagatcaatatccaggcttctgttcaaaatagaaaatttaagctgaatccattcaaatgctattctttgcatttttttcctttaatttacatttgacattaacattctctccctgactttttcccatagtttcttctgatgagcaggaaatgtccactatctagtacaggtgtcttcacttatagtcaaaatggaagaggagcaagtgcacagagttcctgtaagatgcatgttcatgtggctgcacttgctggccactgagttgttgatattgaccaaatcttgtctttagtctgagaaaatgtagggctgtgttatcttgtggcagtgtggcaggctggatgttcactctgacaataacagctcaagttctatacaagagaggctgaggggcagcatttggagggtggagtttgagggttgtttgcaagtgccatttaaacagcattcacagtgtctccaatttgattatgtattcacagtggcttggaaatctggctggaggagtgtttctttttttttttttttgagacggagtcttactctgtcacccaggctggagtgcaatggcatggtctcagctcactgcaacctctgcctcctgggttcaagcgattcagctggaggaaatttgatagggagatgctttagctaaagctcccccttggtggtgctgttgcactataacttccaaagaaaacatcttttttgttgctcatttttttaagcaaacattttattggacactaaggtgcaccaggctctgtgctaggcttaggggaactaatacaacagttaatatccttatagtctaatcctggctattaactttcttaacatcaagagtgaagaaataatattattatatactattatattaaataataatattaatacatagctaattaattcaagccagatccattgctgcatgtagacactatggaggcagtaaccaatttgcctaaagatgatgcattcacaaatttcacaattttaaaggttacttaaaagggtatcacatagctcttaaatatagcttaaaatgcacagtttaagtctaataagaaaattgcagtttaaaacttcactgacatgctatttcttacctatcagattagaaaaatccattttccaggttatgtggaaacagaccgtctcaaaattttctggttgaagtgtaaattggtacaactcctatgaagaatgtggtaatatccatccaaatttcaaataacatcaccctttgacccagcaatcctacgtgcatttgtgcaaaatgacaatgtactagtttattttgggagtattttttataatagcaaaagattaggaacaactcaaatatccaccaacagagacctacttaaatatggtacattgatctagtagtgtgcagctgtaaaaaaaaaaaaagagtaaggtactgatggaaggctctttcagatatattacgtgaaaaatacaagatatgaaataatacatgtagtatgtgattagtgcaggggaaaataatatttgtttgcatttatctttgtttacatgcagaaactctggaaggacacacaagaaactgataaaagtggttatggggtgggaggagagctagccttttcactgtgtatgtttttcctctcatctcttaccatgtaagcaccaaaggggcagtgatctttatttttttcactaatggtatccttataacaatacatggcacataaatatttttagaataaatgattcaaaaataactcaaagaacaaaagtaacataagctgattacaaaaaatagagacaaacttgaagccaactgttaatataatgtctgcttccaagtaatccttaaattgatgtcttgttgtataacactctagatgattttctacttgcgtatatgcaatttaaaaaaaaagttttataggcattttccataatataatctatgttgaaagatatatggcctcaaaatatcattgaatttatccagtgaatattgctaatgccatatattacgacatttaagttgtttatataaatgcatgtctagacacatacaaacagctctggaaagaaaatattcactcatgcatcagagacagtgtatgacagtgtgaacactggaatgggagacccacctccatttcttgccagccgtgtgatcttgggaagttacctaacctttcagtgtgtacagtcctttagtacttgtcccataaagtgattgattcccgggttccaagcaggagacccttatggataatttgcttaataaaattgagcatgaagatacctggataagcaactgcaggagagtttctctcttcaagagggtagggctaggtgaactgctcccagatctgatgtgtgtcttgagcttcgttaagcaacaaggaaaaagactgaaagtctagcaggagcaagttcaagatgagggaccactgattccttggttcaccttgctaagttatatttgcaaagagcagatggtttggactaatctgactctctcgtgcatgttgttttcatcctctacctcagaggctgggagttctgcaggcccggctcctacggagtggccttttgggagcaagttcacattttcctatttacttacgttgttatttttaaaagactttgttttcatttcccattgttaattggctcttggaatttacccctgcctatttcccttcctgaatcttgccatttataaagcaatttcttctttccatatattagttttcctaaagtggggtatatttgatcaaattcaaatagttctgaagtaccagtaacatgactgagaatggctatttatttatttatttattttttttttttgagacagagtctcgctctgtcgcccaggctggagtgcagtggcacgatctcagctcactgcaagctccgcctcctgggttcacaccgttctcctgcctcagcctctcgagtagctaggactacaggcgcctgccaccacaccctgctaattttttgtatttttaatagagacagggtttcaccgtgttagccaggatggtctcaatctcctgatctggtgatccgcccatctcagcctctcaaggtgctgggattacaggtgtgagccactgtgcctggcctatttacatattttttaaaaatttgtaaatgggcatttcgcaggccattctcatataagagggagaattggaagtcctttgaaatatgttttttaaaaaggttttaatttttaagttatccaaagtgacacctgtaatgtgaataggacattccagaacaaaaaagttgaaacaaaattatcagtgttttatacaaattttgtactccttgtgtagctagaaatcaaacgtttcatattaaaatgagaattgaattagtttaaacaagttttgtttgcagaagtctctgattccttatgaagaggaaaagaatatgaaaattttatagtattatgtttttatattgcacttacaaaattgagtgaatattgtgtgatgatcgaaagattttaggcattttttcaagccacagttttttttttttctttcacagtgatatatggtacttactggaaattttacttttatttcctaccatatcatttgcacctgttttgctggtgtgtgttgattggtcttattctatctcgtaagtaattactgaccctgactggtctagacactgactggtagcagtgtaatctcaggccacttaaaaaaggactttcttaaaattgggccacagactaaatgttattaagtttgaagtatcacaccatatctttgttgcaactaagaaagtgaaaataggccttattaaagtctgtttaacttatatcattacatctattttaaatttttttcacaacttgaatagtatttcactttagcttctgttattctttagcttttgatcatgatattgctatgtgttgaaaggatttcatcaggtgtatcagtcagatttaggttcaactgtgaataagagaaaaacctaaaatctgagtatcttaaagaagaaataatttcctctatctccaggtaaagtccagagcagtccttctgagactgataaggaggctctgctccagaaagtctgtattagcttccatttgctgctgtaacaagttactgcaaacttaactgcttaatcaacacagatttgttatcccacaattctgtagatcagaaatctgacttggctctgctggtttctctgttccaggtttcacaaggttgaaatcaagttgtaggcctgctgggttcatattgggaggctctgggaagaatctaccactaggctcattaaggttgttggcagaatctagttccttgtgattgtagaactgagttcccccttgccttcctgagggctgcttagctcctggaaacctctctctggtccttacatgtgggcccctgcatctaactggcacatcaaatgatgcttctcatgcttgaaatccctctgacttctgccacatgtctctgactccagacagataaagttctctgcttttaagggatcatatgattagattgtgcatatttggataatccaggatagtctcccggttttaaggacaataatcttaattatgtctgcaaattaccttttgacctgtaatgtaacatgttcacaggttccaggcattagggcatagacatctttgagcaggggaaattctgcctatcacacagtcctcggagactcacactcttttcagatgcaccatcccctaaccatcccctagggtttgatcctccttcttaggtccaggaagcatcttagttcaagccacaggataggggaggaggcaaacaataaaaagtgaagtgagacactgggtgacttttcttttttttgagacagggtctctgttacccaggctggagtgtggtggcacaatcttggctcaccgcaatctccccttcccgggctcaagcaatcctcccacctcagcttcccaagtagccaggactacaggcatacatcaccatgcccaactaatttttttctattttttgtagacacagggttttgccatgttgtccaggctgttctcgaactcctggactcaagcaatcctcctacctcgacctcccaaagtgttgagattacaggcatgagccaccatgcatggccagcactgagtaactcttcagttttgttgttgttgttgttgttttgaggtggagtcttgctctgttacccaggctggagtgcagtggtgcgatcacggctcactgcaagctccgcctcccaggttcatgccattctcctgcctcagcctcccgagtagctgggactacaggcgcccgctaccatgcccggctaattttttgtattttttttagtagagacgggatttcaccatgttggccaggatggtctcgatctcttgacctcgtgatccacccgcctcggcctcccaaagtgctgggattacaggtgtgagccaccgcgcccggccagcactaactcttaatgaaggttctcagaagctgccaggagaccttcaatctagcaatccagaattcaccatgggatcatacttaacagcagtggaagctgagaaatatagtctttattaattgcagccatgtgctctactaaaaaaaatctgttagtgtagaagaaagggagaaatggatcattggggaacagtcaacagcctctgccccaccaagtgcatttatctaatcattggaaaccagcaaactggagggagtgatagcacaactactacattgtgggagtggagcaacagcaccatcataggcaagttagagggacatagggttagattgaagagaaatctgtcatgtaactacatctgaacacaaagattttatacctgaaagagcatctagaagctatttcatctgactgaaaaaatggatgctttttttttcatctgactgttctgcgaaaggtgttttttttcttttttttttttttgatggaatcttgccctgtcacccaggatggagtgcagtagcttgatctcggctcactgaagcctctccctcctgggttccagcaattctcctgcctcagcctcccgggtagctgggattacaggtgcaacaccaagtccagctaattttagtatttttagtagagatggggtttcaccatgttggccaggctggtctcaactcctgacctcaggtgatccacccgccttggcctcccaaagtgctgggattacaggcgtgagccactgcactggccgaaaggtacatttttagatattgtattaaatctctgctagacacccccacagtttgtaaccaatccatgtatttttgtattatatggatctttaattcttacaacatctaaataccttatctactgaaagggagtgtgaaagtacactttaagtataagaaattccgtttcaggctgggcatggtggtcactcccgtaatcccagcacttttgggaggctgaggtgggcggatcacctgaggtcaggagttcaagaccaacctagccaacgtggtgaaacccggtctctactaaaaatgccaaaattagccaggcgtggtggcgcgcatctgtaatcccagctacttgagaggctgaggcaggagaatcgcttgaacccgggacgcagaggttgcagtgagccgagatctcgccactgcactccatcctgggcgacagagcaagtctgtttccaaaaaaaaaaaaaaaaaaaaaaaagaggccgggcacagtggctcacgcctgtaatcccagcactttggaggccgaggcgagcagatcacgaggtcaggagattgaaaccatcctggctaacacggtgaaaccccatctctactaaaaatacaaaaaattagccaggtgtggtggtgggtgcctgtagtcctagctactcgggaggctgaggcaggagaatggcatgaacccacgtggatcttgcagtgagccgagatcgcgccactgcactccagcctgggtgacagagtgagaccccttctcaaaaagaaaaaaaaaaaagaaaaaatcaaaaaagaagaaattctgtttcaatcaagtagaatttccgtatggccagctaatacagaaagtgataaattgtgcaaagtatatgaatatggaaagtggggggagcaaatagttccaaactaggataaagcagaatacttcataacgtacctgtctttcaaacaagatcttatcggatgaatagtatttcagtaggtaaaaggcaggggaacatgaaaatcacatgtgtaatttagaaacatcaacagatggcaagaaaaagaattttggaaggtatatataactgaatattattataaaggaattacatgttttaaaattttttatctatgaatactaagttttcttgtctccaacctgtgttccttttcttgcctgcagaagtaaaatcagatacagacgttgcagttttaagagtcatgttgatgtgaccctcttcaaggctagttagtacttacagtttgtatttagaggaatctttgactaagattcctctggtgactttttagctccagatgtgctagtacactacgaagcattgtaacagctgtttatttcattagagttggatctagactgccactacctcagaggaaccagatacaagtagatccactccactttatttgacaaaggaaacatgctgatcctaataaccaaaaggaatgtggcaactcgttcatgtatttcagtatctttcacataggacagtgtaactgtgacctgcattttcacttgggaaagagtcctgggaaagacctaagagaacttaagctgttcagcagtggctgcatacctttggaggcaccatcagagagatggatggaaaattgggtaaagggaggtctacccccaaatccaagattctgtgattctgataccttttactttaaagcaatcattttcaggttctgtgttttgttctcgtactctagatctcgtgctttctttgctggtgtcaacatgagcagccaccagctgctctgggatacccactctactcctcccagagcagctcccctctgctttgatctgtttacacgttgccatttcacatcagctttcattggaagaaagggttccattgctttaaatatatgcatacataagcgcatacatatatgaataaataagttgaaaattagaaaaccctttttaaaggatggagtaatgaggttgatcttaaggttctttgaacttctcaaaaggcagtgtagtagtctaagctaatatatctatctaaaagatgaatattgtgcattagaaaaatagtattcttttagtgacattcatgaagtcattttttaaataaataatggacccatttgattatttaagctctatgtgcattttaaagtatattcatcgtgtagaaatactcttttttgccttttacttatttctacatataggttattgagtttttctgcatggttctgtatctcttttgttctctgccctctgcagaattttatctgatagtagatagaatgtggattcttaaggagaaaatctgttttattaattataaggcgtatgtctcagactaccaaaccaagtatactgagtgttttgaattaaatatttagtgcttcattgactatttcctctgacttccattaagaccttgagaaataactcttctctaataagccttttgtttgtttggggccaatatacagattgatgtggaatgaaccattgctgtagtatttagggtgtggtaagcttttctcaggaacttatctcatttcagtatagctcatttttggtaggatattaacaagtctctgtcatggcaggaaacacttggttttgttcccagatgtctgatagtagttcttttttgaggtagtaagatttttttggatgctagcatgggaaagacatgtgaaaagtgtagagagattataaggggcttgatatcaaaggtttttaaagacaaatggtctgtgcttgaacaggacattagaattgagcttaaaatctataacctaattttcttcttcccttgaatacagttggtatattcgaccagcataggctactgcttcaccttagtgactgttgtttttaatttgttaggacactaaaaaatgtattacatgtagaaaatttcccttttagtaaatagttctttgagttgacaaacacatatagtcatgtatttaccaccatagtgaagataatatgttcatctccctaaagattccgctgtgctgctctgtagtcaaaccattcttactacccaagcccccttctgttatttagttttcctttgccactttgtcataaatcttatcatatggtatttagtcttttgagactggagatttatccatgttcttgtgtgtatcattcgtttttattactgagcaagtattttattctatggataccacagtttatccattcactgattgaaggacatttggatgttttcattttggggcaattatgtatgaagctgccataaatatttgtgtagagaattttgtgggaacctaacattttcatttctcttgggtaaatacctaggagtagagtttcttgggcatatgtaattgtatgtttaactttataagaaggtgtcaaagtattttccaaagtggccataccattttgcattcttgccaacaatatatgacagttctagttgctccacatcttcaccagaaattagtgtttgctttttgtaaaagccattttaatagttctgtggtgctcactcatggttttaatttgcatttccctaatgacaaataatgttgagcatcttttcatgtgttcttttgccatccatgtatcttctttggtgaaatgtctatttagatctttatcctttttaatattgggttgtttgggtttttgagttttgagtgtttgagttttctttatatattattttggatacaagtactttgcaagtatgttgttttgcaaacatttatttcttccaggctgtggcttgttttttctcaacatttcaaataatctataattcccatttatcatttttcccctgatacttgtttatagaccacagtactttattttgtccctgttcttatacctcttattgttatagatttattattttgtctaatagatttattatttgtcaagtaatttggaattattagattaattattaggttaataaatctaaaattagttttattatttgtcaaataataaataatatagaatcattttatgtcttgttgttttcgtgtttaacttttagtaagtatgtgtatactttacatcttcaactagattataaactgatgagtaaccattggttaattttcttaaaaattatgtacaaaatagagataaagggaacagttgaataactaataactgtttattcagatgtgagataaataagaacctgtgtccttttcatcagaatttaggtcttctttggacccagttttcaccttctaggaatggccaccaaaaatgcactttagcttgtcttcctatccacagtaaacttcctcccaacccccatcatgatctctttcatcgcacctcacccatttcctatatccaacagttacaacttttacctgaaaaaggataggtagccttcataagggaccctagttctagaggttggtagaagtattgcggattttgatttaaaataatctgaaataattcatagaatgaataaagtgataactataaagtcttcagaactatttcagtttggccaactgtgagattaatcatgttattctagttctctattctgctggaagaaaatagaaagctttccttttggctggggaccagggatgattataatgattgaatttttctcacttccgtctgcaaaatgtccaaattgtggggttttcttaagattttaagaaatgagcagttaagaccttgggaattattgtgtaagttcctgttgccagtgatttataggcctttgcttactcctaaggaaggaagtaattttatgtttatggttatgactctgaatcccagcccagcctaaattgtgcttgtcagtctaatataaaggtaatgatgatgcatagaactcccatacataagatgacttgtggatcattgaatatggaacattagtttttgtccatttactccagttaataaatatggtggtttcttatgccaagcactatagtgggtatagagaaactaaaataaaaactcaacatctgccctcaaagattctatgattattgagaggggagatagacaataaagccatttacaaattcattttgtgaagttgcatgttggtaggaagcataaggcacagtgggaacctagaagggagagcaccaaaatgtgcatgtagcaatcggggagggcctcatagaagagtcacacttagtgaagagtaggagttttccagaggatacggagattgaagaagtatctccagatagtcagcagcaggtgcaaagaccagaggcaaaagactgcatagcttgtcttttttgcttggagaagatgctgaggtatatgcctcagtcactatggcagtcaggctgatacttcaattagagtggttagaacattggactggtgagaccaagatcagtcttttcatctccacccatccacctcagcaagcttcaatttctgatgactacattcctgtgacagacagctcccacaatcctcacctgccagctcacagatgtgggtttagtgtgtatcaccacacccttctgagtacaagggtgagagactgtggatgtttccgtgtatatccatgaccacaactgaaaaatgactctgagatggtcttctgataatgacttaatggcataatttctgtgtatatatatgaaaacttgttcttattttaatgactccaatagactttaaactcttaccgttatgtagcattttatcttgtgtgtatttttactgctctgctatagaaaggatatgacataaatatttaatcactctcagcagaattggccttatttcatggctccagattatctaacttcactgatctaatatttgtggcatggatgttgaagaatcataacttagagctcagttttttaggaagaattttataatggctataaatcgttttgccaagaggcagtttgtacaaaataatgactttaaaaatgagcaagctttttgatgatcataaaatgtgctgaatgtgctattttatacctgtttatttgtgaactcaatttttccattacattcttagtgtttatgcctcagattattcagtgcagacagatgggtgtggactgaagaacagttttgattttagcatatagtcatcattcatgtcccccaaagtctagatttttttaaaacaagtatcttaatttctctggatgacattaaaaggtaaattgtaatattttcaggctgaattatatgtctttgatggctatttttgtaatgagcatgtgctttaggtctttttttcctttagtcaactgcattcccactggaaccaatttggcatctgtgggagtcatagttttaatgtgtgctctgtccatccaccatttcctttggtacaaagaggaacataatgacattgaaatgcttctttcaaaatgtaagttgtaaacaaatctaatcaataaattattttcaagtaaattttgttcttatgaaatctccattagagttcccttcaccctaactctatattcatcacaagaaagtgccagaaggaaatttcaaatgaatgtctgcatttgtggagttttagaccttgcttattagaccacaagtagagtagacagcaacatgctattaacacattgaaatacaacttcaagccatatagcaaactgtgcattgctgggaaccaagccagcttcacattgctgcatggccatattgggcatttgcagagcaaatgtctgtagtggagagccatgacaacattctttttaaatagttgctttgtccgaagtcagaagacgtttttcatccacataccatgtaggaaggaatgctggtaataaattgatctgtttatctacacctgtaaatatagatggtacatctgtaaaacaagggacagtggtatacttaatgagttccctgtacattttcatctgttcagtctcggaattttagatacctggtgcatatgacttactgtttacaaaacctttaaaaactattttcaggtgccttgtcccctttgctttggtggtatatgataatctgtgcatttactttgttttctatgtggaagagaatgagattctgtaaactgtgatcaagtcttcaaagacaagttaaagttctcaaaaatattgttggaaataaaatttgtccctaagagataatatgatttttcctgtagctattgccaaatttatatctgaacctaataatatttacaatattttaaaatcagaaagcaagtaatttgacaaagatattataaaattgctatttaagatatttggctgttatttatgtttctacaaatgttcaggttttagatctttattgatgcacttatataccagaatgagtggctaatttaggatgaaagcacttattggaaggttttgaaatcagcagagaatatgattaaatctcaagtaccagtgatggtatacattttaattgattaaaaattgtattttactacagatgtaggaatttcttattctgaatttcttcagcaattaataaaacaactcacagaaaagatgctaatattgttatgttatattgtaaagaggttcattattattattatagtctctattattttataaatctggcagtgggatgttaggtcatttcatcccctttgagctagtactagattgttcccttcaatatattttccagtgtttcagccagtctgttaatccttcatactagagattcccaggatgttcgttgctggcagtagattcagctccaggaaaaatggcttctgctgccaaggaatgaaatgattcaagggttgtgcttgcaccactgttgtatagtttcctgacattcattccagattttcctttgcttattttcttggatatgtaagttttatactgtgtaaaattgtgtgtgtgcacgcatgctattttataaatttttagtttgcaaaaatttcccctggaaacttaatgcatatttaatgcatgtgaatgagctaatcaatgggattaacgatatctcaggaagtcttacattcagattatgttttaatcaatggtatttttaatgttactaatgaaaagaattgttggtcaccagtgacctccatattgccaaatccagtggacattttctgtctcgtttgtcctttcagttgtatttgacactggtaaccactccttcatcaagataacctcttcttggtttcctcatcttctttatggtttttttggccactcttcaaaattctgtaaaagtttatctagatttgaagtgatcttgtgatactttaaatgttggcatttctcaaagtcaccctgtcttagttcgggttgctataacaaaatagcatatactgggtagcttataaacaacagacatttacttcccacagatctggaatctgggaagtcctagatcaaggcgccgactgatttggtgtctagtgaggacctgcttactgacccaaagagggcagttttttctcttgtcttcccatggtggagagtggaagcaagctctctcggactcttgtaaggacactaatcccatacatgaaggctgtaccctcatgacctcacctaatcctaatgccttcccgaagaccccacctcctaataccatcaccttgggggctaggatttcaacatatacatttgtgggggacacaaacattcagactgtagcaaccccttctcttttctctctctactcttttcctaggtgattgtagccactcccatccttacaccgatgactcacaaacatacatttagctagccctatcctctggcttcagacctgcatgtccaatcagatgactaatgtcatcttttgggtttatcagagacatctcaaactcagcatgtcgaaaatggaaatcttgccctttcccagagtcttttgatcctctttctctgttgccgcctcattgaatgacaccaccatttatgcatgccagaaacctgagagtcaattttgacactccctgtcacctgccatattcaattcattaccaagtcttgtcagcaaccacccctcaaatccattcattctcctttatcatcgccttagtgcctactctactgcagtaactctttaacaggtctgatgtcaactcttgcttcatcagtctccaaccagccaatcatttcaaaatgcagatctcatcctgtgactcctctgctatatactcttcagatacttcccattgttcctagaatgaaggcataattccttggtgattttacctacctctgttcttccccaaggtcagctccttacacattgtcctttacttttgcataggagacatgtttccttccagtctcagtcctatgtctgcctttttcctttgcttgtaattattttcctgcttatctttagtcatcttgcagatcttggctgaatcgttacttttatgaggaaactttcccttacctatctattcaggcaaaatctcatctatttcaagtttcatctgtagtactttgttactcatttacatcaatttgattatttagtttgtccactcaagaatattaacaacacttcccttaatattagctgattcaaaacccatattcacattatgcctgattatctttgaaaaaaatatgtttattttgattagttcaaatcaggattcatacaggatcccacaccacatttgattagtcatgtgtcttagtttttttcagtcgagcagaggcaggtttttgtaaatgaagttttgttagaacacagccatgcccatttgtgtgcatcctatggctgctttctcacatcagttgcagagttaagtgattttaagtgagacaacacagactgcaactatttgctacccgacctaagtttaagaaaaaagttgtgcagtaccccttgcttgcttttcttttttaactattcaactcacatctttgactagttggtcaacaggtaagcagtcttacagaatatctcacatttcagatttgtttgtttgcatcttcctgtgtccttcaatttgttccctctcatcaatttctattgtaaactgaaaattaactctagatgatagatcatttagatggaattttttggcaaaaatacttaatacgtgttcctgtttatttcatattctatcatatcaggagatacataatgtctagttatcctggagatactaagattgattggtaggttcagatggtgatagctaatcctttcattctaaatgtcaccatcattctttcatgtgactttcatttgactaaacggttttattatatattgccaaacggcaaatttctagttaccatattatgtgcatatttgtgacatagagtttttctgtaaagaagaattttccttcatccactgtgtaatcatagttggaaagaggggagtaatgcttaacttcttccttttaatatttaattttcaaaactagagtttcatgcctttggtacctctagtagtaattgatacattttcattttttgtttatttattttattatgaacctctgttcatattgtccatatagattgtatgtttttgatcagtcgcagagcagttattctttttggtttctgattgtttcatttttggccattgggagatcccttatgttgcctcttatgtctttttgacaggactgcatttatctttgacagtttccttgcttccttccttgcttttaggccaacaagatgtctcaaactcatttgtattaaatacatttcttgtctcggacctagaagccacaacgttgttggtaggtgataggatgctcattattgaggagtctgtaattttttttaggtctcttcaatggacaaagctgaaaagatataaattcttgtaaagaaaaaagattatactcttagttctaattcaaattttagattatttaacagaaattctgatttgcttttttgaataacataaatataatgtttttctctttattctgttccgtgtatgtgtatatagttgtttcacaatattataactaattttaagtaagtgaatgaagtttaggatttttttgtgtgtgtttctatttgtccttagaatataacccactgagtatataatgtcatttctacattttaaagttattcaaaataatactttgtctagtttcttttttctttctttttttttataaaataacagtacttttatccaaatgaccaaataaaggttgctgcctgattctcaatttttttttaaattttattattattatagtttaagttttagggtacatgtgcacaatgtgcagcttagttacatatgtatacatgtgccatgctggtgtgctccacccattaactcgtcatttagcattaggtatatctcctaatgctatccctccctccttccccgaccccacaacagtccccagagtgtgatgttccccttcctgtgtccatgtgttctcattgttcaattcccacctatgagtgagaacatgcggtgtttggttttttgtccttgtgatagtttactgagaatgatgatttccagtttcatccgtgtccctacaaaggacatgaactcatcatcttttatggctgcatagtattccatggtgtatatgtgccacattttcttaatccagtctatcattgttggacatttggcttggttccaagtctttgctattgtgaatagtgctgcaataaacatacgtgtgcatgtgtctttatagcagcatgatttataatcctttgggtatatacccagtaatgggatgactgggtcaaatggtatttctagttctagatccctgaggaatcgccacaccgacttccacaatggttgaactagtttacactcccaccaacagtgtaaaagtgttcctatttctccacatcctctccagcacctgttgtttcctgacttttgaatgattgccattctaactggtgtgagatggtatctcattgtggttttgatttgcatttctctgatggccagtgatggtgagcattttttcatgtgttttttggctgcataaatgtcttcttttgagaagtgtctgttcacgttcttcacccactttttgatggggttgtttgtttttttcttgtaaatttgtttgagttctttgtagattccggatattagccctttgtcagatgagtaggttgcgaaaattttctcccattctctaggttgcctgttcactctgatggtagtttcttttgctgtgcagaagctctttagttgaattagatcccatttgtcaactttggcttttgttgccattgcttttggtgttttagacatgaagtccttgcccatgcctatgtcctgaatggtattgcctaggttttcttctagggtttttatggttttaggtcaaacgtttaagtctttaatccatcttgaattaatttttgtataagatgtaaggaagggatccagtttcagctttctccatatggctagccagttttcccagcaccatttattaaatacggaatcctttccccattgattgtttttctcaggtttgtcaacgatcagatagttgtagatatgcggcattatttctgagggctctgttctgttccattgatctatatctctgttttggtaccagtaccatgcttttttggttactgtagccttgtagtatagtttgaagtcaggtagcgtgatgcctccagctttgttcttttggcttaggattgacttggcaatgtgggctcttttttggttccatatgaactttaaagtagttttttccaattctgtgaagaaagtcattggtagcttgatggggatggcattgaatctgtaaattaccttgggcagtatggccattttcacgatattgattcttcctacccatgagcatggaatgttcttccatttgtttgtatcctcttttatttcattgagcagtggtttgtagttctccttgaagaggtccttcatgtcccttgtaagttggattcctagatattttattctctttgaagcaattgtgaatgggagttcactcatgatttggctctctgtttgtctgttattggtgtataagaaagcttgtgatttttgtacattgattttgtatcctgggactttgctgaagttgcttatcagcttaaggagattttgggctgagacaatggggttttctagatatacaatcatgtcatctgcaaacagggacaatttgacttcctctttttctaattgaataccctttatttccttctcctgcctaattgccctggccagaacttccaacactatgttgaataggagtggtgagagagggcatccctgtcttgtggcagttttcaaaggaaatgcttccagtttttgcccattcagtatgatattggctgtgggtttgtcatagatagctcttattattttgagatacgtcccatcaatacctaatttattgagagtttttagcatgaagtgttgttaaattttgtcaaaggccttttctgcatctattgagataatcatgtggtttttgtctttggctctgtttatatgctggattacatttattgatttgcatatattgaaccagccttgcatcctagggatgaagcccacttgatcatggtggataagctttttgatgtgctgctggattcagtttgccagtattttattgaggatttttgcatcaatgttcatcaaggatattggtctaaaattctcttttttggttgtgtctctgccaggctttggtatcaggatgatgctggcctcataaaatgagttagggagggttccctctttttctattgattggaatagtttctgaaggaatggtaccagttcctccttgtacctctggtagaatttggctgtgaatccatctggtcctggactctttttggttggtaagctattgattattgccacaatttcagatcctgttattggtctattcagagattcagcttcttcctggtttagtcttgggagggtgtatgtgtcgaggaatttatccatttcttctagattttctagtttatttgcgtagaggtgtttgtagtattctctgatggtagtttgtatttctgtgggatcggtggtgatgttccctttatcattttttattgcatctatttgattcttctctgttttcgtctttattagtcttgctagcggtctatcaattttgttgatcctttcaaaaaaccagctcctgaattcattaattttttgaagggttttttgtgtctctatttccttcagttctgctctgattttagttatttcttgccttctgctagcttttgaatgtgtttgctcttgcttctctagttcttttaattgtgatgttagggtgtcaattttggatctgtcctgctttctcttgtgggcatttagtgctataaatttccctctacacactgctttgaatgtgtcccagagattctggtatgttgtgtctttgttctcattggtttcaaagaacatctttttttctgccttcatttcattatgtacccagtagtcattcaggagcaggttgttcagtttccatgtagttgagtggttttgagtgagtttcttaatcctgagttctagtttcattgcactgtggtctgagagacagtttgttataatttctgttcttttacatttgctgaggagagctctacttccaactatgtggtcaattttggaataggtgtggtgtggtgctgaaaaaaatgtatattctgttgatttggggtgcagagttctgtagatgtctattaggtccgcttggtgcagagctgagttcaattcctggatatccttgttaactttctgtttcgttgatctgtctaatgttgacagtggggtgttaaagtctcccattattattgtgtgggagtgtaagtgtctttgtaggtccctcaggacttgctttatgaatctggctgctcctgtattgggtgcatatatatttaggatagttagctcttcttgttgaattgatccctttaccattatgtaatggccttctttctctcttttgacctttgttggtttaaagtctgttttatcagacactaggattgcaacccctgcctttttttgttttccatttgcttggtagatcttcctccatccttttattttgagcctatgtgtgtctctgcacgtgagatgggtttcctgaatacagcacactgatgggtcttgaccgtttatccaatttgccagtctgtgtcttttaattggagcatttagtccatttacatttaaagttaatattgttatgtgtgaatttgatcctgtggttatgatgttagctggttatcttgctcgttagttgatgcaggttcttcccagcctcgacggtctttacaatttggcatgtttttgcagtgggtggtacggtttgttcctttccatgtttagtgcttccttcaggagctcttttagggcaggcctggtggtgagaaaatctctcagcatttgcttgtctgtaaaggattttatttctccttcacttatgaagcttagtttggctggatatgaaattctgggttgaaaattcttttctttaagaatgttgactattgtcccccactctcttctggcttgtggagtttctgccgagagatccgctgttagtctgatgggcttccctttgtgggtaacccggcctttctctctggctgcccttaacattttttccctcatttcaactttggtgaatctgacaattatgtgtcttggagttgctcttctcgaggagtatctttgtggcgttctctgtatttcctgaatctgaacgttggcctgccttgctagattggggaagttctcctggataatatcctgcagagtgttttccaacttggttccatcctccccgtcactttcaggtacaccaatcagacgtagatttggtcttttcacatagtcccatatttcttgaaggctttgttcgtttctttttattcttttttctctaaacttcccttctcacttcatttcattcatttcatcttgcatcactgataccctttcttccagttgatcgcattggctcctgaggcttctgcattcttcatgtagttctcgatccttggctttcagctccatcagctcctttaagcacttctctctattgattattctagttatacattcgtctaaatttttttcgaagtatttaacttctttgccttcggtttgaatttcctcctgtagctcggagtactttgattgtctgaagccttcttctctccactcgtcaaagtcattctccgtccagctttgttccattgctggtgaggaactgcgttcctttggaggaggagaggcactctgctttttagagtttccagtttttttgctctgttttttccccatctttgtggttttatctacttttggtctttgatgatggtgatgtacagatgggtttttggtgtggatgtcctttctgtttgttagttttccttctaacagacaggaccctcagctgcaggtctgttggagtttgctagaggtccactccagaccctgtttgcctgggtatcagcagcggtagcttcagaactgcggattttcatgaaccacgaatgctgctgtctgatcgttcctctggaagttttgtctgaaaggagtacccggccgtgtgagatgtcagtctgcccctactggggggtgcctcccagttaggctgctcgggggtcaggggtcagggacccacttaaggaagcagtctgcccattctcagatctccagctgtgtgcttggagaaccactactctcttcaaagctgtcaaacagggacatttaagtctgcagaggttactgctgtctttttgtttgtctgtgccttgcccccagaggtggagcctacaaaggcaggcaggcctccttgagttgtggtgggctctacccagttcgagcttcccggctgctttatttacctaagaaagcctgggcaatggcgggcgcccctcccccagcctcgctgccaccttgcagtttgatctcagactgctgtgctagcagtcagtgagactccgtgggtgtaggaccctccgagccaggtgcgggatataatctcgtggtgcaccgttttttaagcccatcggaaaagcgcagtattagggtgagattgacccgattttccaggtgccatctgtcacccctttctttgactaggaaagggaactccctgaccccttgcgcttcccgagtgaggcaatgcctcgccctgcttcggctcccgcacggtgcgctgcacccactgtcctgcacccactgtctggcactccctagtgagatgaacccagtacctcagatggaaatgcagaaatcacccgtcttctgcgttgcttactctgggagctgtagaccggagctgttcctattcggccatcttggctgccagcttctttgtgtagtttcattaccacttgagatgcaattaaatttgttttagttttcagtttgagggaatttgtttttctttttagttcaactttagtttttgagtatgtataattttaagcagcattaatagagtataatcttttcaacactgcccaaaacatgacacatctagaataatctgtttacttctttttgccatattttaggaatggccagcccagtatcaagggtgggatgatacgagtggtttatcctggatctggatggcaataaggggatatattgtctatgtctgtaaagaatttcaaaactataataaaactaacaagattttgtctgggtttttattctcaccatgcaccagcaattctcaatactaccagtgagaaagtacttctccctccactgagtgtgttgctaagaagcttattaagcagtttgagtatccaaaggagagtaataagactgacgaggaatctgaaaaccatagcccatgagagatgaacagattttaatatcaatcagagaagaaaagatgaagaaattcacaatttcctcatctatttaaagactgtagtgtaaggaaataagttagactttgtgtactgaattccatgtttcattactgggtagaagttacagaacaaatggatttagcttattataaggagaagttttctaattgttagaatttacatatctgtggaatgaggctatttgtcaaactagagagttctttttcccttaaagatgtatagtaagagcagtgcgaacatctcacaagggatgttagatattcttctgtggatagatcttgcacatgatgacctcctgggctctcccagccctgtgattctgagatcacagtgcccatttcaggaatcctcactgtctagacccatccactaaaatgaatcatcatcttattcacatctaagccccattacaagtttattagtatcatccctttcagtggaaatgcgaaatattttattcagttatgctaatgtaattagctcataatgtcaaatgcttgagaagttgaggttgtagttctgctgggtatttgtttctcatgtcaaatatcataccatcagtgaaattgttcataaccaccaaaattaacaattagccccttcagcccctcttccacctttatcatatttatttgcttaacaaatttatctttttttttttttttactcattgattctgaatctccctctatttaaatgtatattctgtgacagcagtcctcaacctttgttgcaccaaggaccagttttgtggaagtcagtttttccacggacaggggcagaacaggggatggttttgggatgaaaccgttccacttcagatcagatcatcaggcattagattctcatgaggagcatacaacctcaattcctcgcatgtgcagttcataatagggttcgtcttcctatgagaatctaatgccaccactgatctgacaggaggcggagctcaggtggtaatgcaagcagtggggagtggctctgaatacagatgaagctttgctcattcaactgccactcacctactgctatgtagcccagttcctaacaggcttcagaatgggggatgggaaccctggttctatgagagcagaatccatgtatctttttgtaccactgaatcccaagcatttcgtgttggtacatttttctgtaagggaatccgtgtcttttgttggcttttaaaatggccacctaaaaaaatttaggaactactataagagtaatgttgtcaaaatcaaataccactgttgagattttgaatctgtgaaggataattgcattcttaatattttgtcttcccttccaaaatcatgctagttagtatttcttcatttattcaagatttcttttatgccaaatagtaaattttggtaattttctttatataggccataaacatgtattattaatttaatttcttggtattttttaatctactaatgggtctactaatgagctttctcaaaggaaggaaaggagggaagaagaagggacattggaaaaggatatacagaatatttttatcagtctaggtaaaggttaacttgcctctggtaatctcatttttttaagttctttaagcatatagataattaagaaaataaattggctaggcactgtggctcgtgcctgtaatcccatcactttgggaggctgaagtgggtggattgcctgaggtcaggatttcaagaccagcttgaccaatatggggaaaccccatctctactaaaaatacaaaagttagctgggcatggtggcatgcgcctgtagtcccagctattcaggaggctgagacaggagaattgcttgaacccggtagaattgcttgaacccgggaggcggaggttgcagtgagccgagatcatgccattgcactccagtctaggcaacagggcgaaactccatctccaaaaaaaaaaaaaaaaagttagaaaaagttcctatggaaatgtgttataattttattattaaagtactgaaaaatacattattagaaaacttcaccttggaatcttttttaagcattactcttttgcttgtggtttttgtcatcttttacagacttgaatgttgttctaggacagaatattgttgtactttattttagtgaagcataaccatatcaaataacatttcagaactatacattgcacaatcttggacattttcttgtaagaaggcactaaggaaattttatttttgtgaaagtaattcttaagtaacagtgactgttttttatgggctagctccagaccacatttgcctccttcccatgatcttgtttttctgatgtcccaagctgtaagtatagaggtcagaatgacattttagggctctaggtttgaatctcataatcttaaaatggatattattcagtttatcaaaaagatcagttctattttttttttcagattaaaaataaattaggccggacatggtggcttatttctgtaatctcaacactttggaaggccagggtggatggatcacttgagcccaagaatttaagaccagactgggcaatatagtgagaccctgcctctagtaaaaattttaaaaattagctgagtgtggtggcacacacttgtggttccagctatttgggaggctgaggtaagaggatcacttgcctaggtagtttaggctgcagtgagctatgattgtggcactgtactccagcctgggtgacagaatgagactgtctcaaaaaaaaaaaattagttttaccaaaaatagtgcaaataattttcatttacctttaactcacattcccaaatgttaaaattttaccacatttgctttactattgtgtttgtctcttttttttgaaatggttgagaataagtttacagacatgatgtcccattgctaagtactacatggtgtatttcttaaaaataaggatatttttcaaaatcaggaaattaacattgataaaaactattttaagtaaaaaatgccttttttctcctccaagtcaggaatctaataccaaaatcatgttacatatagttgtcttctttcatcttttttaatctggaatggtccctcagtctttctttgtcttttatggcctttaaaatttggagaatacagaacagttttttgtttatttgtagaatgtccctcaattttggtttgcttgattttttgggaattagattttggctatgctgtgatcatatcaggagccacatgacatctacttgttccattactgatgttaatgttaactgtgatcccttgtttaaagtgctggtgatacacatttttcaagaatatgtttcttgtattttaagtttttgctctcttttggtagatggagtcctagaatcctttccaagactcaatagaaatatctctttaaatataagcctactttaaaagatttttaactactctgttttggagattaacagcttcttaagactttctctatttcagaggaattttgttttgtctaataatctgtctcctgctctaggttgtaagctccctaagggtagagattgtgtgtacatcattccccaccctgtcttcaatgcccagcactattcccacatgcagtagatagtagttactgcttgactgattggttgtttgataggctggtggttgaatggatgaatggattgttcgtttgtggaaatttgcccatttcaaatcttctaacttactagttttgagttcaacatactttaaaaattacctatcaccctcttggtattaatactttgatatagttttgatgtagttcttcagacatgattctcaaggactaataatagccaagacatatcagatatgttcactattgtgttgattcaccttgtcagattgattttacattctcttctctctagcttgctatttttaaatggcctgaaatgtggcgtcagtgaaattactctgacaataatagtaataattcttattggtcctcttattactttattttttgtaatatcactttaaaatcttggagcggtttaaaattttttactatgttgttcgcttatgggtttgaggcttagagagatcatacacccactattataaagctgccaatgggtgagcaggatttagatttctaagttttgtctttctttaaaaaattttatttttgcaagcacttttccaaaggatttctaagttttctgactcctaattcagtgttctctctaccataatctcttccatattgtagtagtattattgcctacttgccaggaacatattcctaataccgtgaagaaaaagtattttgtatcactttgttctaccaaggcgtattttatgtggttcactaatgacagcctcatattttgagacttttctcccagtgagtatgccttttctcccctaaatagactttttaaagagcagttttaggttcacagcaaaagtgatcagaaagtatagagttgccatatatcccctggcctccaacctcccccactatcaacatcctgtgccagagtgacatatttgttatagttgatgaaactgcattgacacataatcatccaaactacatagtttacattagggttcactcttggtgttgtatattctttggtttttgacaaatgtatgtatccaccattatagtagtaatacagtagcttcactgtcctaaaaatcctctatgctttgtatattcatccctctctcccctctaactcctggcaacccctaatctttttgctgtctccatagtttttccttttccagaatgtcatataaatggaatcacacaatatgtagcctttgcagattggtggctttcacttagtaatttaggttcctccatgtcttttcatgacttcatagctcatttttttagccctaaataataatccatcgtctagatgtaccaccgtttatttatttattcatctactaaagaataccttggttgctttcaagtttgggcagttatgaataaagctgccataaacacctgtgtgcagatttttgtgtggatataagttttcaactcttttggataaattctaaagagcacaatttctggattgtatggtaagagtatatttagttttataagaaactgccgaactgcattccaaagtagctttaccattgtgcatttccaccagcagtgaatgagagttcctgttgctccacatcctcgcctgcatttggtgtaatccatgctctggatttgggccattcaaatagtctgtggtggtgtctcattgtttgaatttgcattttcctagtgatgtatgatgttaaacatctctccatatgcttatttgccatctgtatatcttctctgatgaagtgtctgtttagattttttgcccattttttattctgattgttcattttcttttttaactttttattctgacagtttttttttttcttgggcaccatctagtgaagatacacagaaagctttgaggacataaaaaatgatttattttttcaaaggaaaactcctctctttctgtttctctccttttacctttgtctttcagttatacctgccgccacttgcggagatatgtttatgtgttggacaaactgtatttcccccactctcactgttctacgcttcagcattgcttctcgaccctcagtgacaatggagaggaactcttgtctttaacttgctctcacattctcagatcctatgcttccaggttattaacctctgctgtccatttactgcatgctgcatgttgtatatgactgacaattgcatgttttaataagacatgtgtcaattaaattattaaagagaacatttatatttgaaatggtactaaataatttttttaaaataatagctggattttgtttccttacaaatgtcttcttaagtaatttatattatgtttcacgggagagaggaaagctttcaaccacagagttgtctatataaacttgccagaactattctataccgcattccatttgggaatcttttgatttatagtagttggagtgctctgatgttttatatgaaatagactctacagttactatgacctttgagttctccttcatgcaagcacacctgagagctagctgtaggatttcacctatgttccgatagaggtgcattcagttgagcaggttgattttataggaaggcagaaattatactattggggttttgtattttgtactcattttatttacatacagagtggctataaaatcatataaaatcagcaggttgcaatgtgtcatggatgaatgtagattaaacataatgggggtcggtggagtaagaaagagacaagctgtcaatctcgaatatcagagaaaatcaacacctgctgttttgtgtttatcgtgcaccaaaatagaggggcagtatgacattaccactttgtgctttgcagttaacatttttaacacgtttttttttttctaagtaagagatgacttataccagcactatactgttagctagatatggtgatttaaggcaataacttcactgccagatgatttagatgaagaaggagaaaactccatgacaaccttaaccagaaattagcaaacatttagaatttaaaatagaccttttcagatgatgaaacatataaaacttgagactatacataatatctaagtgaaaatacttgattgctaggaaaggaaagcagtctggtgtgtaagttgacagagacttttcttggaagcagaaagattttatagactcgtgatgatgttgatcagcctcacatcgagtcaatgtagatacttttgagaaataaaaaactgagggttagaaaagtaggtgaaaataatagaattaactgttacgtatgtaatgttagaagaatttatcaaatttagcagactaaacccagtgactttccactggcttatggaaagtgagggaatatcaggtaagttgcatgatactctcaggaattggagacagagtgtgtctggtttcaaggaatgaggagaactgctgctgatcattgaacttctgaaatgtgcaggataattgacgtctttttctttttaattttttttttttttttttttttgagatggagtcttgctctgtcacccaggctaggctgcagtgactcaatctctgctcactgcaacctctgcctccctggcccaagcagttctcccacctcagcctcctgagtagctgggattacaggtgtgcaccaccacgcctggctaatttttatatttttagaagagacagtgtttcaccatgttggccaggctagtcttgaactcctgacctcaagtgatctgccctcctcggcctcccaaagtgttggaattacaggtgtgagccactacacccggtcgaccttactcttatttactagtgtatcatcggactctccacaaaaccaataggagattttatatgtaagtggagagagagagagatggagacagagctattttgggctttggctattgcaggggcttgcaagtctgaaatctgtagggcaggttggcagcctggaaattcaggtaagccttgatattgcagtctcaaattctaaatgcacagggcaggccgtcagacaagtgactcaggcaggatttttatgctgtggtcttcagacagaattccttcttcctcaggaaacctcagtctttataatagcttcagctgattgggtgagtcctattcatgttataaaaggtactctgctttccttaacattccataaatgttaatcacatctgcaaataccttcacagcaacatctagactagtgtttgacccaacaactgggcacaatagtttagccaggtttacacataaaacatcatcacactatgcttctcttctgtgttctttgttaccacgtatctgttccatgtgtttttctttgtatatatcctatcctgtcatatctctcctatggttttgtggaaactataagccttctgggggtaaacactatatcttgttcattgttatacatcgtatagcatatcatgcctggcgcattgttaaccctcattaatacagctggcagcagattttagcattcgtcatgtgtgccagaggcccctgtcttttttctcctggagtcacactcctcacctagcaggagcagacaggagacagaaatacatgttcagctgggaaaataaaagaaaatgaaagaaaaaggagaaggaagacaaagtagggaaaaacaaaagtttaaaaatgaggagaaagatggagacaccatgtggtgaaagcagtgtccaattcctgagcctccttcccctgatgcccagcagagttcagccaacactcagtttctgagtcagtgtagaatttattctgcattttctgtttcctctttcaacacctttcctggaaccccctccttccttacccacttgggtttctcagtactctcagctggggtttacagtatgaagcctccagggggtattttttcaatatcaagccctcctgaggccctgcccatttttttctgaacaacagagaagaaatacagtgttaatatagtgtagtggctaggggcatgggctctggagttaaggcttcctccccatacccccaaccaactttcactccttgccttaccacttgcagtctgggacaggacagaggacactgttctattcaggacagacctgaatagatttgcataaaaggaattacctcgccatcttctcttgccgtgttcctttgcaggtgacaaacattttgcatacacagtgacacatggccaggtggagtgtagtccctgcaggtgagagattttcttcaacagaactacattatatagagagacaaaccaagccaaatatctgaatggagcaatcatggacttacttaacaaaatcaaatagctttctgttatgcggaatttaaaaatgtaactcagtttctagagagaaatataagcttatttcttaaaaaagaactttaccagctgggcgcggtggctaatgcctgtaataccagcactttgggaggccaagatgggcagatcataaggtcaggagatcgagaccatcctggctaacacagtgaaaccctgtctctactaaaaatacaaaaaattagccaggagtggtggcacacgcttgtagtcccagctactcaggagtctgaggcaggagaatcgcttgagcctgggagacggaggttgcagtgagccgagattgtgccactgcactccagcctgggtgacacagagcaagactccgcaaaaaacaaaaaaacaaaaaaaaaactctaccttagtcaaacatgacttactgctatagatagaagtcttactccactgcaaacttcttccaaatgtaagaattcgtttcacagcaaccctgaaagagagcacttctgtgtgctgcttacctcagaaggcagtaaagctcttgctgtttcatttttagaaagattagaatatgttaagcctgcctaccaataatttttgtatattggctatagctctgtgctttagagaaacacataaatgtgtaaactgtgctgtctatgaggtccccttgggtttttgaaaacacctgtcattgactccccttaatttttgttctcttcagcttaaataccttggccacttaaaccattcctgacagccgatgatttttagattatgcagtctttttattatcttcttggatgattgatagtacccatcataaaatttgatatccagaatttgatataatatttcagtatattttataatttaaaaatatgaattataaaattatagttatgttatatgtatttttttctcatctactatggcaatctgtaataaattatactcttaatttgtcctaagactggagtgatttttaaaagcaggcacaccttgactcatatagaattaccagatctttttcacacaaaaacacatttctctagatttgtatatttaattatttgaatgtgattgcagggctttacatttgttcttatttaaatgtaatgtattgaggccagtcacagtgactcacgcctgtaatcttagcagtttgggaggctgaggcaggtggatcacctgaggacaggatttcaagaccagcctggccaacatggtgaaaccctgtctctactaaaaatacaaaaaattagctgggtgtagtggtacatgcctgtagtcccagctacttgggaggctgaggcaggagaatcgcttgaacccaggaggcagaggttgcagtaagccgagatcacgccactgcactccagcctgagcaacagagtgagactctgtctcaagaaataaataaacaaataaatatatgtaatgtattgaatttatcttgttctgagtcacattttatgaagccataagcctttcagacctgttagctcctccattttacccccagaagcattgaaatcagctctcaaactaccaaccttggatttgacttctctagaaatcaaatttagaattttgagtaagcgcttgagaatttcaattcattgctaggcttttttagtttgtgtgtgcacttcagtagcgagttgaggtttacttagtgcttttgacaatgattgtgatatggtcaaagcatgctgcttctgatgactgtcatgcatttaagtgaatctgagaggaaagaatctgactttaggtaacagaccaatactgcttagagttccacgtccaattttaagttctaatttcttaggtttcagggtggagtagtgaataagtttggtgagaaatctgtgaagtaagaaagtacctatttgtctttatttttacttcacatactttgctgatgtcaaaaatatagctgctactattgttttaattaggcctgaggcaaggaaaaatgaagggctaagtttagtgttgagttaattctgttgcagtggcacagtttattttgagttactattaactcggctcttcagattgttgctgcttgatgagagaaagctgaaaagagcatcagaaatgtttaaaaattattttctaacacacattgagttaaaaacattatattctctttttataaagtaaagcatgttaacactgaagtccttgactagttaatactttgccaggatcagtggttcctgaccttttggggttcatataactcttctacaatctattaaaaattatagaccctctcttcaaaaaccagaaataggagtggacctgatttaggcttacatggacctgatttaggtagagttttagatataggtgctgtgtaaaagagagactcccctgcccaaataatagtggcttaaagaagcaaatggaagtttacttctcaagtaaaagtatgagctaatgtggcagctctgccccatagaattttcaagacccagagttcttttttttttttttttttttttttttacttttttaaatttatttttttattgataattcttgggtgtttctcacagagggggatttggcagggtcatgggacaatagtggagggaaggtcagcagataaacaagtgaacaaaggtctctggttttcctaggcagaggaccctgcggccttccgcagtgtttgtgtccctgattacttgagattagggattggtgatgactcttaacgagcatgctgccttcaagcatctgtttaacaaagcacatcttgcaccgcccttaaaccatttaaccctgagtggacacagcacatgtttcagagagcacagggttgggggtaaggtcacagatcaacaggatcccaaggcagaggaatttttcttagtgcagaacaaaatgaaaagtctcccatgtctacttctttcacacagacacggcaaccatccgatttctcaatcttttccccacctttcccgcctttctattccacaaagccgccattgtcatcctggcccgttctcaatgagctgttgggcacacctcccagacggggtggtggccgggcagaggggctcctcacttcccagtaggggcggccgggcagaaggcgcccctcacctcctggacggggcggctggccgggccagggggggctgaccccccccacctccctcccaaacggggtggctggccgggcggggggctgaccccccaacctccctcccggacggggcggctggccgggcagaggggctcctcacatcccagttggggcagccgggcagaggcgcccctcacctcccggacggggcggctggccgggcgggggggctgaccccccaacctccctcccggacggcacggccggccaggcggggggctgacccccccacctccctcccggatggcacggctggccgggcgggggggcctgacccctcacctccctcccggatggggcggctggccaggcggggggctgaccccccccaacctccctcccggacggggtggctgccgggcggagacgctcctcacttcccagatggggtggctgccgggcggagaggctcctcacttctcagacggggcagctgccgggcggaggggctcctcacttctcagacggggtggttgccaggcagagggtctcctcacttctcagacggggcggccaggcatagacgctcctcacctcccagacggggtctcggccgggcagaggcgctcctcacatcccagatggggcggcggggcagaggcgctccccacatctcagacaatgggcggccgggcagagacgctcctcacttcctagatgtgatggcggctgggaagaggcgctcctcacttcctagatgggatggcggccgggcggagacgctcctcactttccagactgggcagccaggcagaggggctcctcacatcccagacgatgggcggccaggcagagacactcctcacttcccagacggggtggcggccgggcagaggctgcaatctcggcactttgggaggccaaggcaggcggctgggaggtgtaggttgtagtgagccgagatcacgccactgcactcccctagagttcttttctgttgtgttccaccaccccctgtgtgttgctctgaccaaaaggtcgcgaatggctcaccacaagctctgcatttcagatagtagaagagtgaaagggactagggttggatgtacatttccattttaagggcatcacacatccctttggccaaaagtttgtcataggactacccaacgtgcgtggtgagctggaaagaaagttttcggctaagtgaccctgtggcctgctaagtattctgctgttgggtaagaagggaagatggttatggggacaactaacagtctctgccatacaatagagagttcctgtcctgactaattaacaaatgcttattcagtgattaccgtgtgattagtcctgtgccaaacagcaaatggggttcatggtgaagacagaaaaataataccattgggaaaaaatcattaccttgtactgttagttaaatataaaattagtaacatataaaaagcgatctcttctgacaggagaatctgaagtagtctgaaacaggattatctgcgcagtaactaagaatagataatgtgctattagcagagtaggcatggaaaactcaagtccagaagttcacatatagaagagcacatgacatatgctaaggcagtaataggatgtttggcaaaaacagatttatctgtgatattaatcagtattgcaacgagttacattctccagggccagactctcgagggccttgaatgctaggccaggccatttcatgtattttatttgttctggctttttttgtgtatgattttggtagcccattgagttttacttggtgcttttgagcctgactgatgtggtcgaagcatgctgcgtctgatgactgtcatgcatttaaatgaacctgaggtgaaagaatctgaatttaggtaatagaccaacacatagactacctgattgtggcagtagagatggaaaaagaaggacttaatggaggtgaactttgaaaaaaaaaggaattgaagtatgatattgagagaacataattcaacattgaaatggtgtagtatgaaatattagcaggaactgtgttattacttctgtgcatgtagttagttcctatcaacatggcaaatatttagtatgtatcatttgtgtggtttatattttatactgtaagaggagtgtgctaggggtattcttattaccgatactcatattaaaagctttgtgtaatcagttggtaaaagaatgattttttaagagtgaagattttttgaactgtccaaccatttaaaaatttgttatactaaagatatagcataatacgtgattctggattattttccagccatacaatgcaatacaaagaatggcgattcaagagatctgtttcacaacatggtgattattgttaataacaatgtattgtatacatgaaaattgctaagagagtagatctttaagtgttcttaccacaaagaagtatgtgaagcaattaatatgttaatttgcctgatttaatcatttccacaatgtatacatatatcaaaacatcatttacatcataaatatatataatttttgtcaattaaaaaatttagtaatgaagatagtggattctataaagaaatatgctagaagtatttaccaaaagtcattaaaatgttaatatattggaatttatcttaagggaagaacttaacctaaagaaagggttatatttaggaacaaaatagaagaatggtcaaataaactatatcctatcaactcaatggaatatcatacagccattaaaatattataaagaaaaataagtagaaatatggaaaacatttgacataatgtttatgaaaaaagaatataagcttctatactgctattttctatttttagtagttatatttgatataatgtttaatgaaaaaaatataaaattatatactgctattaaaacaactacataaaaattatgtatgtgtccaaaaaccagataatgtataaaaatagctgtggaacaatagtaaaatgtacatgacatttctttttaaaattatttaaaatttatcttttacaaattaaaaaaattatgcaaatttaaataaattttttctctcacttttctctaccctcctcccaaccacccctaagttacatgtatgtctttggattttctttccttttttccctctactaacataatgcaatgccactttattaataggcaaagaactgcggtggtttacaggattagataggagttcctcagtatgatcacagagaatttctcccatggtttattttagaactttcatagatttgctttttttcttctttttttttcttttctttttaactgaatggatttataattctaagtacgtgtaatatgaaatcatttttatatctcaactgtagcactttcaaatttaggaatacttttacccatttgtcatgtcttttatactgtgctttaaaaaaaatcacatctggtgccattttattactttcaaaggattgcatcttcagtctaaatctaagacaaagctctaatgagtttcctcaaaacaagttttaaaaattgctggaatggtcttgtcatataatatgctattcacttaatctgtaatgaataaatacttgaagctatagtaataatttttcatgcatatgatactgtcgtaataattctgttgtggctgtgctttattgatttctgtgccacttctgtggcatgaaatgaaatgtattatcccacttaaaccattatggtttccttttgaattacatattcattacttgatcctgtcatcaagcctattctattttccataatgtggtattcagtcttaaagatttacagcgttagtcagtgcagtataagtcaaaataggacaagtaaattcagatcagaaaagttggtaagaaaatgtaatagataaatttttttatttaattatactttaagttttagggtacatgggcacaacgtgcaggtttgttacatatgtatacatgtgccatgttggtgtgctgcacccattaacttgtcatttacattaggtatatctcctaatgctatccctcctttctccccccaccccacaacaggccctggtgtgtgatgttccccttcctgtgtccaagtgttctcattgttcatttcccacctatgagtgagaacatgtggtgtttggttttttgtccttgtgatagtttgctgagagtgatggtttccagcttcatccatgtccctacaaaggacattaactcatccttttttatggccacatagtattccatggtgtatatgtgccacattttcttaatccagtctatcattgttggacatttggcttggttccaagtctttgctattgtgaatagtgctgcaataaacatacgtgtgcatgtgtctttatagcagcatgatttataatcctttgggtatatacccagtaatgggatggctgggtcaaatggtatttctagttctagatccctgaggaatcgccacaccgacttccacaatggttaaactagtttacagtcccaccaacagtgtaaaagtgttcctatttctccacatcctctccagcacctgttgtttcctgactttttaatgattgccattctaactggtgtgagatggtatctcattgtggttttgatttgcatttctctgatggccagtgatgatgagcattttttcatgtgtcttttggctgcataaatgtcttcttttgagaagtgtctgttcatgttcttcacccactttttgatggggttgtttttttcttgtaaatttgtttgagttctttgtagattttggatattagccccttgtcagatgggtagatggcaaaaattttctcccattctgtaggttgcctgttcactctgatggtagtttcttttgctgtgcagaagctctttagttgaattagatcccatttgtcaattttggcttttgttgccattgtttttggtgttttagacatgaagtccttgcccatgcctatgtcctgaatggtattgcctaggttttcttctagggtttttatggttttaggtctaacatctaagtctttaatccatcttgaattaatttttgtataaggtgtaaggaagggatccagtttcagttttctccatatggctagccagttttcccagcaccatttattaaatagggaatcctttccccatttcttgtttttgtcaggtttgtcaaagatcagatggttgtagatgtgtggcactatttctgagggctctgttctgttccattggtctatatctctgttttggtaccagtaccatgctgttttggttactgtagccttgtagtacagtttgaagtcaagtagcgtgatgcctccagctttgttctcttggcttaggattgacttggcgatgcgggctcttttttggttccatatgaactttaaagtagttttttccaattctgtgaagaaggtcattggtagcttgatggggatggcattgaatctttaaattaccttgggcagtatggccagtttcatgatattgattcttcctacccatgagcatggaatattctcccatttgtttgtatcctcttttatttcattgagcagtggtttgtagttctccttgaagaggtccttcacgtcccttgtaagttggattcctaggtattttactctctttgaagcaattgtgaatgggagttcactcatgatttggctataatagataaatttttaaaaattgttcttctaacttagtatgtttctggtttggggtttttctttttttcaagaaccatgggagtgaattgtttacatgcattctaggggagagtagaaggcacattttgagaaacttcaccgccttctttacttgacctcaacagatgaactaggtagtacagccccaccctcttttggcttctgtgacagcatactcctggctttcttcccccccttttgccattttttttatgctttttggttttaaacattagaacttttaaaaagcttgttcctaaagcccttttctgtacttaaactcttaccttagccattttcatcaatttctatgactttacatgacatccacatgccaatatgttccaaattgatagtccagctgaaactctgagcccttgtcctgtcctgagagctgccttactgttaacatcaacactcatacctcacatgtcccatctcccaagagaactcttaagctttctccataaaccttttcatctccatgaatggtgcctgtatccgtcaagttgcttctgcccaccatctaagagtcatcagcattttcccctcacctgctgtattcatcctcactacatccatttcagttctctatccaaaatataaatcaaatctgtacttttttttctctgttaccactgccagtcaccctagctcagacagtccttatcacacacctggactcctacctagtccttttcctcaagttctgtcaccccaccctcacccctaattcccgatccagcaagcatcttcatagattctaagttacatgtatcttccttgctcaaccctttagtgacttttctttgcccttaggatgctacattctctagccatatcaattgtgctttctcttccaggagttgctcaccccttttctatctcaggactttttgcatgttctttcctgtctttttccttctccatattttcttacatttttcacttcctcagacaagttttcctttatccaaaacattgttatgttaatattatggttcctctcacacaccacccctcgcactctctcacttttgctgtcactctcactctaagagtagatcattagttccataagggcagaaaatgtgtgtgtgtgtgtgtgtgtgtgtgtgtaaccactgatccctagcacttaatatgatacttgggtattcaataggtgcttcatatttgctgagaatgggtaattttgttttgctgaaatgaacttaactttttgcagacttgctcagtctactaatgaccacttttcaatagacttagagaagcagtaaagtgtgatcctgttataaagctactgtgtcttaaaagtagcattcaaggccgggtgcagtgcagtggctcacacctgtaatcccagcactttggaaggccaaggcgggtggatcacctgaggttaggagttccagaccagcctggccaacatggcgaaaccccatctctactaaaaatacaaaacattagccgggtgtggtggtgggtgcctgtgatcccagctactcgggaggctgaggcaggagaattcgcttgaacccgggaggtgaaggttgcagtgagccgagatcgcaccactgcactccaagttgggcaacagagtgaggctccatctcaaaaaaaaaaaaaaaaaaaaaaaaagatggtagcattcaagagagcataattagataatgaagtatttggttgtagttctctggttttagtttctacccacgtacagtaaaactacctgactaaacgaaggctccctaagtcttcttgaatttgtggaattgcattgcttttcctcccagtgaaagaatttacaaattttccacttgttgaaattatctgataaccatgaccatcaaggcagtatcaacatgctttgaaacatccctcctaaaaacacaaaactttttcttgtggttgtatctatagtgttgagtgggtagggtgctttggcttcaattctgggtagaagcagtagtgtagattctgttatgatttcctcagctaggaggggaggatagggagaggctggttaatgaatacaaaattatagctagctagaaagagtgagttctgttgttctgtggtactgaagggtaaatatggttaactataatttattgtatattctcaaaaaactagaagagagaattttgaatgttcacaacacaaggaaatgatgaatatttgaggtgatggctatcctaattactttgatttgatcattacctgttgtatacacacatagaggtatcactctgaatcgcataaatatgtacagttataatgcatcaactaaaaaggagaaaacttaattttaaagtaacacgatactttgagtagacagtgaactgaactaacaattacatcttgttaggtaagaataaagtgttgggaaaatatatacatatatgaccattaattaaataaaagcatgaaaaaaatcataaagtaacatttactctgctagcttcagctaagcagaagagcacagaagggaaagcaaaattattttacattaaattttgccacttgacatttaaacacaaaattggaaaaatttgaaaatagagtagtcctagcaagctttaccatcaccactcactcccccaaaaagttttcctttggcataagtaaattatggaggctaatgactgcaatagtagtaacagagtgaagtttcaggaatataggtaaaacataagaaaatacatatttgtgtatattaaaaataccatttaactttttaattcaaaatgacttagcagaaaatcaaataaatttgtactataactggaaatatttttaaaatatttttttgtgttacttatgagagtattgttaagatttattgaagactaacagtaacattaaaaccccacccagaataaattttagattactagcctgccacagtgatctacactaaaatgtcaccaaattgtagtatcattcaaaaatggaagaaattaagtcagtgactaaaaatataacaaaaatacttattaactaactggatttttaatctgtaagaaggatgtcatgagaattttggcatatggaaacaatgtaagaataggaccttaggaaagaacgatatgaaattcatatttgatccaaaaaatggtagtagatccttttttcccaccagatgctcctaggtgtagattgcattggtgaaggaggcactctagtctcagttgatgtcgagtgtgtaggtgtgggtgtgtaggtgtgaccagaattcctgaatatggacatgctaaataacaaattaaaatttctcgtgcagtttaaactatgtgtatggaggatttggattggatacaaaattcctcaagttggatgctcttcctctgggctgccatttgcagggaatttcatgtacatattcagacatgcagacttgcacaactgcttattatagaaatattctttgttactaagtgtctaacagacttaaacatacagggtttccgtatatggagaaaagtgattccacccactccatgccctggcacgtcatgatgccagcccttagatttatttggcttccagaatttaaatagacagtgatgtaaatcagaagttagtgtttcacctactggcactaagtaactaaatcatcacattggtgatgaggaaggtaaatccttttcagtttggctacagaatggaaataacatttattacaatatgatctaagttatattgacaacagaatgatttatttctatgttataaaagatgaagaaggagaggagaatacagagaagttaaatggtttggcagtgatcacacaacaagccgaaagtagaatccaagtctctctggagtcccttctctgatcaaagtttcatcttattgaatgtcacagcattataaagtgagataaatgtatctcaccacacatgtgcttagtgaattattctcagtagatagcttcttctatttttaaacattttgttctgagattttaaaatttcaattctattctcttatgttttaaaaccgtgttcacagatttgagctaaaatgggaatcgaagagtgactttggcatttttccatgactattcttgtattgatcttaaactggcatcacacgtgttccaggagggcacttgttttgcacaacagttttacaaactagctgtctataagaggcagttcattaaaatttaatgtttttaaatgatctttagatgtatagaattttttaaagactacatattagagaaagcatgcatacaaaatatttttttttttgcccagtagtggtgataatagctaacatttattgaactcttactctgtaatagccactgttccagtgattaactctttattttaattttttttaattttatttttattatatattgacaaattacagttacatatttatggggtgcaaagtggtgttaagattttttaatacaatgtggaaagattaagttaagctagttagcatatccatcacctcgatatttaacattttttgtgacgagaacattagagatttactgttagtgatattgaaatgtatataacaattatattcaccatgctgtgcaattgatctaaaaaaggatcaaacttattcttcctgcctaactggggctttgtaccctttgactgtaatctccttttccccgctacccccttggccgctggtaaccaccattctactgtctacttctatgagtttagtcgtttttcaatgcaatctctataaaaattccaatgccatttctcatacatatagaaaaataatcctaaaatttatataaaaccacagagaaacccaagtagccaaggcaattgtaagcaaaaaagaacaaagctggagcattacactactagatttcaaactactgtattctataaaatgatagtaattagaacacattgtacagtataaaaaaagacacattgaccagtggaacagggtagagagcccagaagagaacccatgcaactgtggtcaattgatcttcaacaaatgtatcaagaatatacagtaggaaaggacagtgtcttcaataaatggtgtttggaaaattggatatccatatgcaaaagagggaaatcgaacccttacctcacaccacctacaaaatcaaatcaaattggattaacatcttcagcataagacctgaaactgttaaactactggaagaaaacataggagaaaagctaaatgacattgtgtctggacaatgatatttatagttattaaatatttttatttaaatcctcaaaacaactctatgagatattattattcccattttatggataaggaaactgatgtacagagtgattaaatgacttgctagaggctaggtgcagtggcccatgcctgtaatcccagcactctgggtggaaggatcgcttgaggccaggagttcaagaccagcttaggcaagactctgtctcaaaaaaaaaaaaaaaaaaaaaaaaaattagccaggcatggtggcacatatgtatagtcccaggaggctgaggcaggaggatcgcttgagcccaggtgtttgaggctgcagtgagctatgattgcactattacactccagcctgggtgacatagtgagaccccgtctccaaaatgagtgaatgaatgacttgtttagaaagctattaaagcagtattgcaatccaaacattctggcccccaaagccacacttttgaccttattctttgcctcttaataatccttttaataatagtatgatttcattagctttgcccttgaaatcattttgactcatcgtagagccattacaaatttaatattatttgatgtctatacattctaaattatatttgtgtctaaattattgaacttctgttctttacctactcacaatttcactaggagataatttataaaactggctaaaatttaaaattgatgtgtaaactgtagaaacagaagaaactcaaaaccatttttcttggtcatttaaattctttattttccatttagtctggtctctgttctctaaatatataataatgtccttgttttccaaagctactaatccttataaaaatttcatggtgttgtatccaaaatatctaagttcggttttgattttttatacaggtttgatttttttttcttctcaaagtaatagtggatatagggtattttcaactagatttcacaaagtaagcatttataggcagattttcaaggtaacccaaaaggtaagttttaggttttacttagtactggaagaggaaaaattaagagtaattaccaactgagtataatttacaatggtgattaatagtctcatagcttccttgtcattcttctgtttagttactaacaattgtatttattattctgctaactttaagtaaacaagcagaagcttttctggggattctgaagtatagttactatcaaaatatagtcgacccttgaacgatgtggggcaagatgccaacccccaaacccccctgcactccccccagcacaatcacaatagaactttgacaaataactttgcatatgactttgaacttccccaaaacttaactactaatagcctactgttgaccagaagccttacctaaaaaatatacagttgattaacatatattttgtatgttttatgttttatatactgtatttctactataaagtaagctgggaaaagaaaatgctattaagaaaatcactatttattacgtagaaatggatcatcataaaggtcttccctgtcttcacactgaataggccgaggagggaggacgagtagggggaggtggtctgctgtctcaggggtggcagacgtggaagaaaatgcatgtataagtggatctgcacagttcaaccctgtgttgttcaaggcactgtatgtacacttttatacaggtaacatttatacagagacttaaaaatgttcacttttaagttcgttcttgtatctcatgttgataccattattttcatatgtgcatttattttcaggtagcacatactatatgccaataggaagttcaagaccctattaattataacagtagaagtcttaagaattcaatgtattgtctctgcatcctagcatgcaatggttgtggcattgagagtctgggcagagagagcaatgtatgtctggttagggtggtttcattaagtttcatgtgatatccttcagtcctaaacctccaaaatcacttttaaagatagcaatgtaaccatatacaatgatatttcagtcttttctgtaaaatgttaaaagtaaaagaaaaaccaatgtagtatcagtgaataaaaagctgcaggaaaatttatttctgtgtgttcagttagaaaagtgtgtttgggaaatacttttcacagtttagctgattgtacaatagcctctgaatttttcttactatccctaaatggtcaagtcagagagcatcattatggtttaaatactggtcagtaaaacacaatggacagttatctgttctgtgattatcttgctgttttcttgtcttgcataacactatagtactgtagcaggcagctattgaaacagtgttgtgattgtctagtttaacggaaggaaaagagcttttgttttcattagttttttaatattccttttgaagaatcactgtcatttaattttggtgcctggcactaagcagcaaatgcaagaggtatgcagactgccaaattttatgtaacagttgatgtgactattgcaagagtttgtggtatttcctgttatcatggttgtttagagaaattttatttcaccctcaccatctagttttctagtctctccttttccctgtggctttattactgatattaataacctgtgcattgattctatatacagtaataatttgtggttctacagaaagatgatccatttgagctggaatcatggtataaactaagaggcactggttacaaagtgtaaatgtaactcacttatgcctgtgacttttgggttatttggatttatttttctgttacttttttgcccacatgcttgttatttggtcatttctgggcttgggtcattgtttggcagatagtaaatgtagattacttgtttttttaactactctggagataaaatatgataacagcatattatctaatgcttcccagtgctccatatgccatttagaagtttggccagaactatgaaagcaaagttcttttgccctggaaaagaagaagcagttgaactcatattcttttccccacctcaaccccttttaaaaaaattttcgattcagggaatacattcaggtttgttacaaggatatattgcatgatgctgaggtttggacttctgttgatcccgtcacccatatagtgaacatagtagtacctgataggaagtttttcagcccttgtccccttcctctgtccccacttttggagtcctcagtttctgttattcccatctttatgtccatgtgtacccagtgtttggctcccacttataaatgagaatatgtgatatctagttttttttctgtgttaattcacctaggaatcactgcaaaatacatgattttgttcttgtttatggctgcttagtatttcatggtgtatgtgtaccacattttcttcatccactccaccattgatgagcgtctaggttgattccatgcctttgctattataaatagtgctgtgataaacatgcaagtgcagttgtctttgtacccatattcttttttttattattatactttaagttttagggtacatgtgcacaatgtgcaggttagttacatacgtatacatgtgccacattggtgtgctgcacccagtaactcgtcatttaacattaggtatatctccaaatgctatccctcccccttccccctaccccacaacaggccccagtgtgtgatgttccccttcctgtgtccatgtgttctcattgttcaattcccacctatgagtgaggacacgcgatgtttggttttttgtccttgcgatagtttgctgagaatgatggtttccagcttcatccatgtccctacaaaggacatgaactcatcatttttcatggctgcatagtattccatgtgtacccatattcttaagaggaacttttcatttatgaacagccagatcttagaggcccattttccttttccattgtctgtgtgtcacagactgcccctgacaaggtatattaagaatatgctccttctgtgctacattgtctagctgtgatgggcctcataaaacaaaatggacagaaccaggaccccctggatgaagtacttctacttcccacctcatatgaatcttttctttaaatgaaaccaagtcagtttgtgttaatttgaaatgccttctccacagtcaaactggtggtggttttgttctgccatagtgataatgctaccccccaaacagccaaatgaacgcttaaaatgattgctttatagttaactcagctctgggatatttgtattcttggatttcagtttgttggcacacaacttaaatcactgctttttacgtattggggaatgtatatccttatttgagtagtgctttttaacttcaagaatgaaaaagaatcaataagttgtttttttcagaggatgaggtggccttattgatttataacgtgtggaagtttgatatctctctccataatcaaaaccacagaactcactttctcaatacctattgtgttttttagcataaagaagccatatgtattatcatgttatttttcctaacatggttctgtaggtgatagtctctgattttgtacatttagaaaagtgaatttttccctcttacataaccaaatgacatttcttctggtggtctatatttatataaatacaatagttattttctggcctattaatatttgttactcaaatatttggggagagtttcattctcattctgttatttttagatatattatcatcccattaaaaatatctttctgatgtcctatttcagctttgaattttaattccttgtatttgtcttaaactgtgatgttcaaaaatcagtgttacctagaattaattgtcttgtttaatgtacaattctgctgaaaaatatgttaatgggatttctaatgccttagctcattatactagctcactaaatgtatagtgtttggcccaaaagtgacagctttccatgtgtgctattttgtttatttattactgtccttactgtcaatgtgaacaaatgagcacagagttgatactcagaattgggcaagttgtaggtgttaggagcaggacaagaccagatcttcacttcacccattttccccatgagattgcaagagtaacttttcttagactgtgtaccagcagcggccgggcgcagtggctcacacctgtaatgccagcactttgggaggccgaggcgggcgatcatgaggtcaggagattgagactatcctggctaacacagtgaaaccccgcctctactaaacatacaaaaaattagctgggtgtggtggcaggcgcctatagtcccagctactcggacggctgaggcaggagaatggcgtgaacccaggaagcggagcttgcagtgagccgagatcgcaccactgcactccagcctgggtgacagagactccatctcaaaaaaaaaaaaaaaaaaaaagaagattgtgtaccggcagtgaatatatgatctcccttttgacaatcggatattcacaactgagcgtttgtccctatgtcctctgaaagtgatggttggatttataattttttagcaagatccctctggattatgcgtgcatttttggttactagatacagatatacctgaaagccctacttttacattgtaaagtttgttagaattcacattctcttcggtgtgagtgaagatggtgaacctcatagtagtgtaaaaataataaaaaatgtttcaaatctgagcctcaaagaggttggcctgatggattcagtccataaataggacaggtgggtggatggatgatcttaggtaggcttactgactaaagtgacttttaaagaagtttttggaggacagacctttggtggattaataggtttgttccaagcgtagggggtggcataaaagaagatataggcagtagtgggcgagagagacaaaggattcatttaggagaaaacaacagggaatgggacaggatgtgggaggagatgagatcagacataagaattggaaaagagttgtggaccatttaaagacaagaaaaaaagttgtgctttaaatgttgagagccaacactgattagaagtgtgtttgaacatatactccctctaaaagagagaatgctagcagttcagtaagtttcattgtttaataaaaaaagacagtgggcagagcaaaaaataaagtgattattaagtgagtgattatataatttatgatccaaacctggtcactttaagagagtgaaagggatactatttagtgagacaaaatgtgtaaactgggactggacaaatcaagatgtggttatcccattattattaaataatgacttggaattcattaatagatcacaaagacaggaaaaattaaaatcctgagttttgaaagtgacacatcgtaataatcctttaaaaactaaacaggaaggtgtcagattttggtcaggacaagcagaaacagttgctgaggttgatagacaaatgttggtgttttcatagcattgtgcatatggtgcttaggctatgagtcaggctgcctaggcttgagttctagttctgccactgaccagctggtaatcttcagcaagcaagttgggaataacagggaaacctgcccctctgggttgaggccaggtttaaacgaggccatgtgtacacgcaaaatactttgcacagtacatgtcacatgctaagcactcacatgtggctattatttttttctactattactacaataacaactactttttatacattagcagttagcatattttcaatttaaagataaatactttaagctttctgatgttgttgtgagctttctgccttttatttctagcaatatttcagtaattgatgaaataaattcgaaaaactgtttttcattccagctttaatattatgaagctcacattacaacttctacctgtctagactgttcttacttttcataagtagacaagtttctacagtcatataatagaattattgaatacagtaattctcattttacattcaagtaagtcttaaagatgtaatttttagcagcattgtgtttttcaaatccaattcctgctctgtagcagataggttctgttgttgctgtaaatgatagctgaatagtaatcatttaattttctcttttaagaaagatgaaacttttcttggggatgggggatggttcttggcaaacaaaaatgatgtgatttaggtcttttatagaaattcatgagattacttgtaattcaacttgaacatgtccttcttgtatttattgttcctttttattgaaatactctttctcaagattgtgcacaactcacacacacacagcatcttcaggtctttgcttaaatgacacctcctcagtgaagccttccctgaccaccccttccaaaaactaaagcctccttctagcactcctcattccttctgtagctttattttataatgtcataaatgatggttattttagaagccctgtaatagttcttcttacctctgagatatatgcggtggtcccccattatcctcgttttgttttctggggtttcagttacccacaatcaaatgtagtctaaaaatattaaatggaaagtttcagaaatagaaaattcgtaagtttttaattgtgcactgtgctgcatagtgtaattaaattttgccgtgtcccacctggaatgcgaatcatccctttgtgtagtgtatccctgttgtatatgcgacctgcccattagtcacttaacagccattacttagcagccatctcagttatcagatcaaaaaaccatagtatatattgggtttgctactatccatggttttgggaatccactgggggtcttagaatgtatcccccgtggataaggggggaatactgtattgctgcagtatctctgaactctgactctgtgatggaataagggtttgcacttctctactacctcagtaacccagtccttagggaattgagctttcttttataattagtttgcttgtaagagaacttatggaatgtctaatcttagttgggagtgagttgtggccttggctaaggatgaagtgacaatactctttcaagcatagccctctggagaaaaggccacttcccttcccccgccaaaaaaaaaaaaattttgttttttgtttttttgtttttcccaacagaagagtttttactactggagacccaagagccctaacttgctttttagtgggaagagaggaactgcctcatcttaaacacatccctatgtatattagtcagctcaggctcataacaaaataccatagactgagtggcttaaacaacagaagtttattttctcactgttgtagaaactggaagtccaagatcaaagtgccagtagggtggggtctagtggggtctggtgagggccctccccttgggctgcagatggctgccttctcactgcgtgttcacaaggcctcttcttagtacgtgcacagagagagagatctgtggtgtctctttgtatggagacactaatccttttgggtcagagcctcacccttatgacctcattaaccttaattatttccttattccaaatacagcgatactagaggttagggcttcaacataggaaatttgggggagacacatacattcagtccctaacactgtgcatcccaaattatttctgagttcagttcaattaaataaacattttttgagaccctgttaaatgtacaggcactacgctaggcatcaaagaggcagaagtgaactatcccaggctcaagaacttaatatttagtgaaataaaatgtatataattaacttgaaaatgtggtaaatatttttctaagctacattttgaagggtgaatcgaaaattgccaggcaggtttgtataggggagggaagtgagtgtaggccaagcagttaacggaggaacagaatggagtgtgcaggaatgatgagcggactgatgtggagtgaagtaaagagtgatgggcacaaatttagaagtgcaggactgccttgtggtgtttgtccttcctgatggtgccacaacgttttctggaaaagtagcaagtacctaatatgttgattttcacaatgaaggataagttttaaaagactatcaatgactggcatttacaatctacaataagagactagttgtgcaaataaaatacagtgatacaaatcacttaattagtgggattaggtgaataaaatttcccctcaaatacgtagtgttgtatttaaaaaatcacagtgaaatttaaaatactgtggttatcagagatggaaaaaaaatgtgcaatcaccacttcaagtaaggaaaaacattacattaaaaatctttggttttctccagtgttccttaagtttctacgtaaaatatctaaaactgtggggttttcttcacacagatgttcaaaaatcactattcacttccaaccaagatagagtaacagagactggatttacccttctgcctgaaacaacaaccaaaacagacacagtatatagaacagggactttggagacactgggcatcaggcaacaaaagaaacaaatccctgagagatgttagcaattgaggggagccctgtgagtattgagagttcccagaccactgttcagaattatagctaataagccaacaaatagaatcataaaaatactcaacccaaaagaaggcagaaaaatggaaaaaggggaaaaaaagaatcaataggacaaatggaaaactatagcaaaaggatagatataaatgcaaccatatcactaacaccagcaaaagaaagcaggagggacttatcaggcaaagtgacttcagagaggaaacatcaccagaataaagaaaattatttcataacaatgaaggaatcagtgtatcaagaggactattataatcctaaatgtgtactttataacatacacatttgaagcaaaaactaataaaattgcaaggagaaacaaattacagttatagttggagctttcaatatatctttgttattaactaatagaaaaagtagacagaaaatgagtaagagtgtggaagacttaatgctatcaaacaacttcacctcgttgacatttatagaacactccaaccaataacagctccagccaaaacatttgcataggaacatttgccaacaaagaccatattctatgccatcaaacaagtctcagtaagattcaggttataagattcaagtcatggaaagtttgttttctgacaacaatggaattataatagatatcaataatggataactttctggaaaatccccatatatttggaaattaaataacatacttctaaataatccatgaatcaaagaagaaaccaaaagcgatttttaaactaagtgaaaatgaaaatggaacatatcaaatgttgtgggatggctgccactaaagcagtattttaaggggaaggtatagcctgaaatgcctatattggaaagaaagaaagatctcaaatcagtgacttcagctttcaccttaagaaactagaaaaagaacaacaaattaagcccaaaataaaataaaaataataaaaagcaggaatcactgatatagaaaacaaatgcagtagataaaattaaaaccaaaagctcattccttgagaagatcaacaaaaatgataaacctttggccaagattgtatgtggagtaattttgggctgtatcttgaacatatgatggttacacagattaggtatccctaatctaaaaatccaaaatgctccaaaattcagaacgttttgagcaccgacataatactcaaaggaaacattcactggagcattttggatttcaaatttttggatttggtatgttcacctggtaagtatcatgccaatattccaaaatttgcaggaattcaaaattaaaaacacttctggttccaagcatttcagatgaaggaaattcaacctgtattgtggggactctggacaattctattataaaccagctggtttgtgtctcgtaaaacagaataacatgttctctttactgggggatcaaggattaaattaaaatgcatttatgtaaaaattaaagattttttcattggcatataaatatagttctgagtgatctcaaaatcatgctgttccacggaaacattcattttgctttgggtttctctcataaatcatcttaacttttatccttgactttttcttaccagagcacatctcttttgtttaaaatacccatctaactccaacacgaccttgactctagatggtttgctgcatttcatgacgtggtatttccagtgattctccaaatcagaaactgcatactaacggcctgcagcctggactcaggctagagaggtgctgtgtttggtttgcacagttttttttgtttgtttggttttggttttttgaagttagaatttgttgctaacatataacaagttggaatagctggcaatgcagagcccacagtcctccatgccagaaatcaattggaactgaatggtgactttttccataggttctctcttaagggtttttacattaattccctcaatttaaccatcacagcaactcttaactgccaccatcattatcaccaagtataaggaaactgagtctcagaaaaattaagtgtcagaaatcccatgagctattaaatggaggagtgggtgtttaaatacaaatgtgtctgaattagcctatattcctttctgcataacatcaaaaatgaggttattttatctttcagttgaaaaatcattggtatccataaatattatatgatgctagctgtagtgccccaggtatcaagtttatcatgttaaattgtgcaaggttaaaatttacaatcatttatcaattttctttaagttccttaatgtggagtttaccataggctactttctcatttctagaatattgacatttgttgcctgtactgtccatataggttactgataaataattgagaaaggtgttcactttaacattgttttcctatttaaattctttatttaatatgattcccatttatgaaaataacaactaatcactaccagagaacgaggatgggcactgacatctatagttttctggtttcaaaaggaacacagaaattaaacttcattttgaataaaagctgtccatgatttagataataatttatatctcttatcaagaaaaaagtcttccttacaaagatagacttgtatattctagcttaataaatatttactttttgactgaacagattagattctttaatctgggactgtttgtttctatctaactagcattgttatcagactagagttaggtttttccatacaacagatcacttgacaaataattaaatacatctattatacaaaagtaaactggaattaaatactaacatttatagtctaggtcatgtaatttcctctaccaaaagtaaggaaaatattaaccctctccactttagtataaactttaaagaagttcaacagattcatgctttgaataaagtatcttttgctttctttttttgccttaagtggaaatgatggtgctggtagtaagagattattttactgttgctatctctgctgattaagaatgaacaaaatatcaaagcatttacatacagaggaagcagtagatacttcgtgttaaacagaccttgggcaatttactttccctcagctcccttctctgtaaaatagggatagtaatatctaccttatgttgacaatgatttctctaaagacccaatcctgtatttgttgtgtaatagatactctatagatggtaactataagcctattcatcgttgttgtcatcatcatcatcatcatcacaacaaaataactttatggttttgacagacctgaagatatattgtgtggtaactatatattccaagtcaaaagttgtgacatggtttgtaagcaaatggtagaatcacattaggtgacattttaagtactcagtatatcaagaaactttacagtaggtgtcttaaattggacactgttcaaacaaattagaaatggagacactctttaagcctaatagatctttactgaatattggtcaaatctccttatcagttgtaattacagtacagtgaaaagtctgtgtaacccaaagctactgagcttcagattttaaataactcatagcaaaataaagttcagtaatagtctcatacatgaaggcagtgagatcattatggaatggaaagagcactggattgggagtcaaaagaccagagttgttctggctctcagaaagctttgtgactgtggtctagttgtcacctctcttgtttttcatcaacactcaaagaagggagctggattacattgtgaagatcccaaatataatgtatcaatgcccttcagtgtgctgtaatgggaattaactgtagcttttgagccagcagagggagcacgaagcatgaatttatgtctgggttttaggaaaatgggggcgtggtgggggggttacatggttaaacattaattacagttcttaaaatagattatttcctatcaggttatacccaacttgatttgatctataatattatctggagatggtggcattcttaaaactactgatagaattctacctctgtaattatcggtagttataataaaggactatattccaaaagtacatttaatccatggttatttctgaggattactatcgtttattttctctattgttagtgtatttttattagaaagaattataattttatcattttggaaatattctgttgatattgaaataactgggctatttgaaaccataagaatctttaagtgatacatcatttatctagcattcttgggaattgtgcagttccacatattttccaaataacaaaagtatgtttcactaaagcgccaccttaaaaatgttagaaagtatttgggatagagatcttgctattgcagacttttaggagtttgaagtaaagaccttacacacatttgaatctttttctcattgctgcagggttgttgatttgagcatgtactgatgtactaaaccatagtggaattctgagtttgctccttctttgatgttgaggcccatttttctctttttggtcacactactcttagatttttcccatttccacatattcccattctggttttcctttcttctttgttgcttttattatttagaagctttcactgaggaagccagtaactgagctttctgagaactgtgttaaattaagattctaatttaaggcctaaggagttaaatccatggctttcctataggcattgataacaacttcattcatggaaattgttctctctttgtggtttcggtttatgtattaagaggttggaaagggagctacttctttattcaggatgagtcacagtagagatgggtttcttatgaagttactgtaaatatatgattggttttgtggtttttctaaaaagtagttttagaactttaactcaaagaatatcttatccaccagtcagtagatagtttatttaaaaggaaaatgagggatcattaacccactgaaaccattggtatatacaggaggcattgtggaagtgttaaaagaagaaaagaggaatggacatctgtgcccttgaacttgtattcacataagaaatgagacaaacctacaaacaaaagataaaggaagacatgggaaaaatgtgtaggacaagtataaattaataattaggtacacaaagatcaaaaggaagttgaaataaatggataaagtttttacagacataagatttttttatagtgatgaagctaataggtgttgaaaaaaggcatttaccagtaaagacctataattccagttaaggcttcctgttcctatggccatcccaaagactaattatattcactaaattaagattaagggctaagcaaaaaagaaatttcaaagttccagttgagattctcaaattaagggtccaacacctgggaaatattttggctatcaattgtgttataacgtagttataggtactctgcagcatttccccaaagttagcagtatcatgtttcctgtgactatctttgtaaaatctgacatatagtaaacatgctttatttggtaggtttcccctgagaggaaatttctttacacttaggaagtgccttatgacctgtgataataataacttctaccctgccatcctggctcctcttgcactcactgtgaggtcattccactttccaaatgaattttctctttcaatgttatttcgatcccaattattcccataaattagtgacactgtgccataggatttttaaaaaactggacagatttgctatttccttggtgtgcaattttctcaagagactaagaaagggtcaccgaaaaagacaaccaaacttctttcaagtcagaaaatctctttctttacagaacataattttctaatagagaaaataccataaaacttctaataagatcgatatctttagaattgcatactaattataaaaaattagactttcatcgtagtttagtttataaaggatatatacatttttaaaatccattgtccatgaaatatgtataaaaggagtaaagtgctttttagataaattaccaatttttaattttgtaatttttgctaaataacatttctgaccaaatctagtcaaaattggaaagaagccaagcacagtggctcacacctataatcccagcactttgggaggctgaagtgggaggatcatttgaggccagaagttcaagaccagtgcgggcaacaaggcaagacctcatctctgcaaaaaaaaaaaaaaaaaaaaagccaggcttggtgacacgtgcctgttgtcccagctattcaggaggctgaagctggagaatcacttgggtccagaagcttgaggctgtcatgagctatgattgcaccactgtactctagcctggtcaacagaatgagaccctgtttcttaaaaaaaaaattgaaaaaaaatgtgcttatgttaaaaacacaaatgaaatttgcatgaatgtttttgtggaaaatgaaaataattgtctttaagctaatgttagattctcttatttcagtctcttataaatttggtagtatagttaccagagtgtatattgacagattgtgtattttacctattattttcaacatattttatcagcaataatttttgtaacatcattttttaagttgttagccatctttcagttttctttctatgtcttccacattttgactttagttaccttagctaggggaaattcaattcctgagtttcagcatttttttaaagaaacattgtttagtccaatactttgccatgttgtatgactagttattattgggtttacatataatttttgattatgcagtcataccatgaaggtcatactgaatgttgtactataattttgagttcttgctaagatacattatgtgtttttaggattctaggattggcttctccagttacaatgcagggtgtgcccttttggtgggaacctctttcactaaatatcacacatatatttctttgtcttttgcttttactatatatagagtttttgaagaagatgagttattgtgttttctttatagtgttgaaatatggagcagtaggttctactagaacatgtgtggtgcttagtgtactgatggacacatctgttgtccatgcattatgctgtgtactgctagtcacaagacatttgcattttaacaagcattacttgacagtcagcaagctggtggtgctgagttttgttattttgttctccaccttttattccataaaatcaacatcattttagctcttgtcctggatggaaatgaattttaagctagttattataaacctaaaataatgtttatggttagtaaggcaattaaatgtgaatgaacgggcagtttaccctgccctaaccttgcttctttgtataaatgtcagtgttcttagtaaagattgttacgtaattagtctttccttcattttaacttttggtccttaaagataagatttttaaactaaaatcaactaagactgcttgtttctgattttgtaaggcaagaataccgacgtcattgcagtttcttttattggagtaagaacgatagaaaagaagataaatcatcaattagtagtaagcatattttagaccatgttgtgcgcagaacactgtccaaggatctacaatcaaggccttaaatgaacttggcatttggaaaaatacatgtttacagtacaaatatgcattacacttgtgtgtagcagtttaagagcaactatgaagccgcatattgaagcaaacaaataattaagatgacataatttgatagagaaaaaaagcttgggaagttactatttctattataatctgcaagtaaaaagagacaagtttcataacatgaatttgttctgtcttcgtcggctttgatgtttttttctgttatggtgtattaatcctcacatgttttccgtatttgttagaaccatcgttatctgtccctttcttcttcagccttttccctcagttctcgctctctctctgtctcagcttaagttcacttcattctctcttcttgcacatgggttttctctgtgaagctaagcgtgaccatagccaactccgggattacgtctttacaatcttctaaccagagagaaaaagcagctttctcaccctttctagttagtaaaatcctagggaatatttccagctggctcaactagagcttatattcattgaccaatctttgtgactcagggaatgagcctgtgtcataatctcacttttttcaggaaagtagtttctgtttctgaaagtagggggtgagagtgaatcatattggacaagaaaaatagccatcataattaataaatctccatataagagataatgaagtagtgtaatgagtccatggtctagactcggattaccaggctgtgaattctagctcttccatttatgaatagtatagtccttggcaagttaatttacttctgtatgtcatcacttataatgtgatgttaataataatactgtcttcattaaggagctgtatatttagttaacaaatgtaaaaggttagagagatgtgtggcatagagcacattctcagtaagtgctagctgccatcattcttattatctacatcatcatcatagaaaaagataccattgggacccatcctaggaattgtaagtctggtttaacatgccataatcaatcagtaccatccactattttattagacttaaaaagaaaactatatgatcatctcagtaggtacagaaaaagcatttgacaaaattcaatggccatttatgaaaagaaatgaaaccagctttcacataacaaggaatagagggaatttcttcaacctgacaaagagcatcaatgaaaaccttacagctaaaatcatacttagtgaaaaatgatacttttcccctaagatcaggaaaatggcaagaatatgtactctgacctttattcagtattgtactataggtcctagccagtgccataagtcaagaaacagaaatttttaatatccagattagaaaagaagatttagaactatcttttaaattttattaactatttagctatttgcacaagacatgaatatgtgttttaaaagtcctaatgaatctacaagaaacctactaggattgctaaatgagtttagcaggatcataggacacaaaaaggtcagtatataataattttattgttgaatttactgttaaatttgttattgtcagcatatagcaaatttatttctacattcttgctatgaacaatcagtaattgaaaaataatgccatttacggcagcatcaaaaatatgaaataacttaagaatagacttaaaatacattcaagacctggtacactgaaaactataaaacattgctgaaagaaattaaggaagacctaagtaaacagggtgattttatcctcatggattagagacttagtattgttaagatcctgaaattgatctatacgttgaacacaatcctaatcaaaaccttaccaggtgatttggtagaaaatgacaagttgattcaatattatacaaaggacctagaatagccaaaagcaattttgacaaagcctaagttggaagactcacactacctgatttcaagatttactataaagctggtgtaatcaagacagtgggataatagtgtatgacagatttatggaccaatggaattgaatagaatcaagaaatagaccagtgcatatatgctcaatgaaatttcaacaagggtgccaaggtaatttaagggggaaaggataatcttttcaacaaatggtactggaacaattaaatagctatatgcacaaattaaaaaaaaaacacccaaaccaattaaataaattgtgactcttcatgccatatacacatattaatgcaaaatggatcatagacataaatataagaactaaaactataaaacttaaaacttaactgtaaaactatagaagaaatcatagaaaatctttgggatcttggattaggcaaagatttcttagataggacataaaaaacaaacaattttttaaaaatgtgatgaactgatgaatttcatcaaatttaaaatttttgctcttcaaaagacactgttttttgaagaaaatgaaaaagacaaactgccccactaccaccacccacaggccatagactgggagaaaatgtttacaaaacttatacctgataaagaacttgtatccagaatatataaagaactcttacaactcagggagaagaaaaacaacccattgttttaaatgggcaaagatttgaatagacacttcaccaaagacaacatatgagcactagaaaactcatttggaaaatgcaaattaaaaccacaaagaaaattacttcacacccactaaaatggctaaagtgaaaaagactgaaatgccaagtgttagcaagaatgtgcaacggtttagcagtttcttatagagtgaaacaaataacatacaatccagcaatcttactcataggtatgtattcaagagaaatgaaaacatatgttcacacaaaaacctgtacaactgtttacagcagccttcttaatagaccaacactgataaataaagaaatcgaggcacgtctgtgcaatggaaaactactcagcaataaaaaggaatgaattactgatatacaaaacagcatggatgcatttgaaaagcattatgctgagtgatagatggcagacacaaaagagtacctaaggtataattctatttgcagaaaattttagaaaaggcaactacagtgacaggaagcagatcagtggttgcctggaagggtgaggggaagggtattggagcaggagattgagtgtaaaagagcccaaggaaactttttggggtaatggaaatggtctgtatcattattgtagtgatggattacatgaatgtttacatttttcaaaaacatttttcattgcactgtctacttaaaatttgtgagttttattatataaagattatttctcaataaagctgattaaaactaaggtaaccagtagcatagggctgtcattaaggaccaccagtggttcagaagcagggagagcacaggtttgagaaatctttcccagagggtgtggaatcggtggtatgggggctgtaaggacttgtaggagaggaggaaggaggggtgtctacacgtagagggaatcagtgtctacagatgagagcatgacacttggtgtgagatttggtttgtagctcccactccacctctaataattttaatagttttttggttttttttattttttattgttttacattttagtagctctttaggatttataaagaacttttgtattcactacataatgtaaatttgatcacgggtcaagcacctaactctctacacctaggtttctttatctgtaaatcatctgctcccaggtcttttgtggagttcagttacttctcttttcccctatgactgctgttactagtgtgttagaggaaggactgaggcatggagagagaagttggctgagagttgtgaggattggcagggctctcataggaaatgtctgaaactttcaaagacagaacctccacaccccctcccagtaagtgacctttctgtgatgcgttccctttaccttcggagcattactctagcactctgctccccagcaatgttcaacttcttaaaaatctacacctattttctgtacttcctcacatcctgcttatttctcaagcgctgcagtccagcttccgcctcctcctcccctctgacagtggataaagtcaccactgatttgtttccttgtgccaaatccagtgacttcgttttttgtttttttgttgttgttgggttttgtttttgtttgtacgtttgtttttggtaaatcctactttactatttgacagcttttaacagtgatgattatttcctccttaaaattgttctcttggcttccagaatgtctttctttcctagttcttctcctacttcttatttaagtgaccctttctggcctctgttcaccctttcggtcttggtgtttcccacagttgctttttttttttttttttttttttttttgagacggagtctcgctttgttgcccaggctggagtgcagcacttgagaatctcagctcactgcaacctctgcctcccgggttcaagaattctcctgcctcagcctcctgagtagctgggattacaggcacgtgccaccacgcccagctagtttttgtatttttattagagatggggtttcaccatgttggtcaggctggtctgaaattcctgacctcgtgatccacccgcctcagcctcccaaagcgctgggattacaggtgtgagccagcacacccgacctcatacagttctttcttacattacacaatatccttgggtgatcacctccacttttgtgattgcagctgatgcaaatagcctaaaatttctcctcccctctcttctgagcaccaaattagtatttctaaactgcccatctgcttctttctgaccatctccacctgttgttcctgagcacctgtaggtttcctagaagatttgttaagagcacagattctagagccagcaatgctagcattgactcctgactccaccacttagctgtgtgcctgggcaaattactctctctggttcaattccatcatctatttataaaagggggagggagaatggataatggtaggacctacctcacatggttgttagatggacagcacctgatatataactcataactgctgctactgttattaatttctttttcttcctgagcgctctccctccctttcaacttgttgtattcctagcatgtcagtcaccttatcagctagccactgtgtttcccaagttagagacctcagtcagccctgattcccttctttcccgctccatgctgtctctgccttccacatagctcccatttgctttaaggcatcctcatctctttatttggataatatggacgtttcctaaaggttctgtttctagtcttgttcacttgtcatctcctgtccatccttttctccaggagcagaggagtctttctaaaacaagtagaattttatacacttggcccacattgctcaggtcagtggttttcaaccttcggttctaggagccctgaagttccatggtagagactctgtggccaccatagatggcagggcatagggaggaggcttaggacatagaggcacaaggagtaatctgccatccttactgctgagccctgcctcccacctcacacctcaataccaaacacagcagttttgcgttgatcactttctcatattgtagtcctgctttcatagaacacgtctggctttcaggatgaagtccaaggtctgagagagacatgaggcagttgataagccatcctcactgctacccagcctcattgctgtgctctgctgtgtactcaacacttgatgcacgtgcagtgctgtttcccccacccacaggactcgtatttctctgcccaactcacctttgtgattgcctgatttgctcagctgactcctaattgtttcttaagaagcagtgcaggcatcatctcccaaagtgattgcctctttctcccttcaggtgcagttgagcagtcctcacctgtgttcccctaacattccatgttcacctccagtctatttaggcacgtcctttctcacctgactgcgccctctggggaggcaggacagaaactgtgttgcttttgctttcacattgcctggcacatactaggcgctgggtaaatatttgactcactgtctgtctcaatggctgagcaagatgaaatgcagacctcttagcatggtccatgtggccttcttatttggcccctcttgtcttaccggcttcatttcttgccacttctcacccctgtgagttttctctattcttgccttataagttatgggtatttccttgaaatctcccagtgcctttctaaacactttcccccttctgaattactcttcctccccgtttgcttttccaaatagcaagtcctctaaccttcaaggccacagtcaagatagatttcctctgtggaatgcacctaatcttccccctgttctcccacagcgctctcttcagacccatggaattctctgatttcagtattgtaaaaattttttttttctcatcccagtagacttgagttccttgggggcggggagccatgtctctttcattattttgtaagaattagcttctcactccgaatagaataaaagtccagggcttttgatgtgccataaagcggcccttcacagtctggcttcaaactgtcttcattctggtgtcatctcctgccaccatctgtgtaccctacactacagccatttccaccagcttgtgattttctcagcgtgttcccgtttggactgaccacacttattctgtttacatgctgctttcttttgtgaaatgctgtcattggcaggggctctgttttcttcaagatagcatgttctttttatcagatttttaaaacgttatataatacttcctgcatacacaaaaaatagagcaatataccactctctcatgtatgtatccagtgttacctaagaacattttatatatactgtatatgtgtccatatatatatatagagagagagagggagtactcatgtgagagctggactccctttttcctccttcctcagagaacagtggctatcctaagtgtaggatttatcatttccatatatatttgatgttattaatatattttatctgtaaatgatgtgtaatattgtttttcattttaaaaacataaaatcagcttgttcatattttctaaggattcctgcttatttttttactcaacattgtttttgagatttattcatattcatacatgtagcattagataattttaaattgctgtataatatttccttgtataactatcccacagtttatttacccattctgttcttgattagtgttttggctgttttcattttttaaatttgtaatgaacattcttatgcaaaaagaaaaactagtctttttcaaattttaaaaaagtattctagcaaatagatcccagctaagtgaatattaagctaacttaaagatcatttttatttttaagactgatttttaaaatcaaatttatccatttacatacaaacatcatatatctttattccttattctgattagcattaagctgggggtaagtacgttgaatgcaaagctttaagcaaaagttactcttttcactaagcagtttgcaagtcatgtctcgtatacattttgccttaaaaatgttaaataaaagccaaaattataatgtttaaataaaactttgaaagtacttgctataagattttagtaaaatgcctgttaaattgtatgatagtaacaaaggaagtgtgaattctctgtttctcttcgatggagagctgaatgtgacctcaaatgatctattcttacagagaatttcttaaagatagctagaagcagtatccacagcttcttggggtataccatttcaacatttgtgtccttagtagtaaaattttccattatgctcaaccaaaatatctcatgtttgaattgaagctcacttccttgtttggtgtcctactagcaagcaaaacagagtgttcatactctcttttaaaatcagtaaacaaacaaactagcctttcttctctaaaagaaacagtttcaagtgttttttgctctggtccctaggactgtttaataattttcttaaattgataatgagagttactatagatcacctctattgttctctgatagtgcactaataggggacacaggcgcgcacacacacacacacacacacacacacacacacacacacacacggaatgtgagaatgaacatcccaggtttgctaaactcaggaagcacctcctgagttcttattttttcttcaactaagcaaagtatgctgctgtgcttcacttgttccatttcttcttcctaacaccaagaagctcacttctttcaggcatatttattgcttttctttttttgtttgggtagccaatttatgtttttgagtcttgccacaccttgtgcaagaattgactacccaaagttcttttagcctcaaaaaatttctgaaattccatttattccagaaaatatactgcaactaattagaagcgtattactgatttccttctgtatgcatttccatgtaaacatgtcttataaacaatcccaatttttttacctttttttttttgcatctcctgcaaaataatttacatactcgaaaatatggaccccctaatgcagttcagtattatgttcagttactcttactcagcagttttgcttcaggcaatttatccaaaagatagtctcactcaggcatgctaaaacttatttacaagggtgttcatttcaatgctgtttataatataaaaatttggaaacaattgcagtgagtgattaataatggactaaataaattacggtatatccatatcctttgatatcaagtaacagtaaacactcatgtgtttgttgaatgaatgaaggaatatattgttagatagacaaagtgaaaggtacagcatagtatatatttcatggaataacaaagatggatatatatgtatacagtatgcatttgtttacatgcattaatgcatataaggtttctggaatcatacacaataaacttaatattagttatcagtgggtcatgagaataacgatgagtggaaagtatggtgtttactgttaaccttaaaaaggaaagataaagcaaaactaaacctcaaatggagaagacccagaaaaataaaatgattggaaaaaagtgtgtgtgctcttatgtactgaattctgttttctacttcttgtatagtacctccattccaattttcttgctctctcctacttttgcctctgtgctttgccttctatttggaagtggcttttattctctcttgcacagataactctttcttctttttcaagacattgggtagggcctaaggtgaccttcatgaaacttcactggagtatttcatttcagaagtgtttcatttcaaagaaatcgttcgttcagatatatcctcagcatgtaaccagtatcataaaatttcatacttattcattcagtaattacttcatgtaattatttttcttcccactttatttaagtataaatgtaaataatattcattgcctctgttatgtttgttttgtacaacatctaacattaccaataaatgttaaggaatttttttccttgatgatatgagttgaaacttaatctacaaagactacttagtggccctgtcttcaatggatatcctttttaaaccatctgaaataattacagattttcctaaattgatatttaaatattttatttgtaaggggattactaaatactacagtgaagttttggcataaaaaaatactaaaggccatacttcagatttttatgggaagtacatggaatcagaattgcctttgtttttaagctgccatctatcccaaagaagaatcctttctttatttgatacaataaatttaatattgggatcatataattataatacatacctctgaagttcttttattaggcacataagtatttaggattgttatgttttcatggtaaactggctttcatcattataaaatctccctctttatctctagtaataataatattgttcttaagcctactttgtcggaaattaacatggccattccaacttccttatgattaatgtttttatagtatgtcttttttgtatccttttgttaacttgtctgtatctttaaatttacaaatgtgtctcttttaaactgcacatggttgggtctcgcttttttatccagtctgaaaatctctgacatttaactggagtgtttagtgcatttatatttaatgtaaatcaactgtattctttgaagattgtttgttttgctctattagggtgcctcttagaataaagtaatttgcactctagaatagaatagtctgactcctaaagcatggcctttctaagcattcaactaaatgttcatgttcattgatttttatcttctggctggttggagctccaatatccctcagtctgttatggtccccaaaatctctgtttaatttacagctcctgggtagttgtttactgccacaccttgtggagtcttgctctgcacattacagcttaacatttatacaaacattcaagaagacacttggatttctggacctgctttctggaaattctctcctctctagtattccaccttgcaaaatgcagttgccacagcagtgttaaattcctctctctgccttagctcagcacaacactgctgtgtactctttgggtcccaccttcctggaccatagtctgcaatgttcctcgagacagaagctcaccattatggggctcatcttcatctcccttttgttagggattataatcctttacttcacatgttgtgttacatctgaaaacagttgtgtcattttttttttttagttttcagttagtgatagcaggagagttagtccagtatcagttaatctgtcatggccagaagcagaaatcttataaaacattttgaatcattatttttgagaaataaagctataatacagaaccatagactctgtatgacagtagagaaataatcttgtccaacacactttttcagaagatgagaaaatacacaagctcaagtgacttgtagtagattgcactatgagttagtcatagtctacatctcaggtttttgccactattcttttccctatagtaatcttatgaaaaatgctcctgtgtttgaaacataattttaaactgtcattaaaaaattttttagaattcttatgatttaaacatcctccccactccttttttcttacataaatactattattaatcttgctgttaacacaggcatgaagaaagaatcatttacaagtatattttagaataattgacatgctgtggaactatatatttccacagaagacagaaaagaaaacagttcctttaatataattggttttttgtttgtttttccagtttattttctttgctgtctaaaaaacacaacaaagttctggaacaagccacacagtccttgagaggttcgctgagttctaatgatgttcctctaccagattatgtaagtagttaccttattcatcaataaaaaattttcctttcagccaggcacagtaactcctgcctgtaatcccagcactttgggaggccgaggcagatggatcacttggtcgggagttcaagaccagcctggccaacatggtgaaaccccatctctactaaaaatgcaaaaattagctgggtgtggtggtgcacacctgtagtcccagctatttgggaggccgaggcaggagaatcacttgaatccgggaggcagaggttgcagtgagctgagatcatgcccctgcactgtagcctgggtgacacagtaagactctgcatctcaaaaaaataataaataaataaattatttcattgtaaaatttataatagcattacccctctcttctcaagattttactgtgctgaaaatctttgctgcccaagaaacctctaatatgcaaatagaagagtgatgtctcaaatcaagggaacaagttgtaaatgattgttaacaagtggttgaagaaaatcaaccttaaaccaataatttgtacataattaagaatctttatatctgagttgagaaacccactcaagctaataacacaaaaacaaaagcagggatgattttataggaagtatgcaaagattccttattgaacttaaggggagcaagtacacctggatttcccagagatctggaacctaaaattgaaaagccattgggtcctgttttgggggtcatttcgtttctggtctctgcttccttttgcttctgctttattctgctgctgctttctaccatccaggtttatctgtttgcttacttggacctaaaatagcaaccccagcccttcctcttcttccctccaaccttgtgagtgcagtgcctttagctgtcttaaagtcttaaagtcctcattctcaattcctgagaaagagaatctaattggctctgctctcatcagggtgtgactccagtcttaccagacatggtcagaagagagcagcagtaacatgtggcctttgttccatccaccttaatgacgaagagtttattaccaactgctacggttgaatgtgccatccaaaactcatgttgaaacttaatccccagtgtggcagtattgagaagtgggaccttgaataggtgattggatcccttataaatggattaatgaattcatggatcaatagattagtgagttaatggattaataggttagcataggaggggaactagtagctttataagaagaggaagagagacttgagctagcatgttagcatgcactgtgtgataccctgcatcatcttgggatgccacagagagtcaccactagcaagaaggttctcaccagctgcatctccttgaccatggccttcccagcctccataactgtataaattcctttttctttataaattacctagtttcaggtattctgttctaaccgacagaaaatgcactaagacatcacctgaccttagaggatgctgatggaatagaatagaaacagcacaggggtgagcataatataataataggaaagagaatgtgttataaattttcttaaagtagtgtgactacctgtgacatttcttacattttggaatatggctttgatgaagatgctaaaaattatcttgccattaaccacaggagaagttcatcaagttctaataaggacagctctaaatctccagacaacaacatagtggattggtatttagaaactttattagagaactctttagttctgagtttgcagtgatgatgcataccagacagctgtagagttgccttgcttctttcctgtggtttgtttcatttctaaatggttgtcctgatatgagactgtgggaacagtacccagtccagatatcagtcaatgataaacaaagatagctgtgtgcagccacagcctgactggtgctagttttttctcgtgtgtgtgtgggtatgtgatgtcacaatctgtcatccccttaaggtattaagtttataattccaaaatgtatcttttaagattttcctgttaagttgaatgttctaattttttaattagcataacagctcgcttaattctacacttgccatacctgtgataagaaaaatatatctagtaactgtttagaaaccctatcggggccagggtggcaatggggagttgggtttaccaaaaacttgaatttgggtcatctgcaaatgttttgttatttataagcaattattatttgatttatgtagtattcctgtgccatttactccacaaaaatgtgttgaatatgtatagttctgaagttctgatgttgccttagtagcattcttctttaatcagagatctataaaattaatatttgaggaaataggtcatatttactggtatttgccaaccatggaggtaattatgccatgataggacaatttgaatttgtaacagtcctgtgaattctgctactgaagtttacagattttagagtcactgattgaatattttcttcttgtataaaattttcactaagtaaaaatgaatttcttaaagcatctgcttctagaaatagtgggaaaattccatttggaatctgtcattgacaatccttttttttttttttcttaacatttatgtgtatgagactttgtaaatcacaacattttccaaatgggtttatgaacttgaattttgctgccttttctcagatttaattgaagagaatggttagcactgattcagtaggagagatgactgtgaatcactcctgatagagacctgaaaggtgattaaacaaacagcagtaaccttaaaaataagcaccgttgtatgttctttcatgatacttcaatgttttgttggtcattcccattgctcaaaacactgttgtataagtgatttacacatttgaaaccattttctcttttacattagtcattaactgggaaaatgaacatgttccttccttttctttcacagaagttttacttaagtacctttgccagtaaccacataaaattctgtgtcctggactaatgctttaaaccacttgttggtaaaagatgaaaaaggaaaatgagaaggtcttaatgcagcagtggattcctagatgtgtacttttttttttttttttttgagacagagtctcacgacgtgtactttctacaccaagactgaatgtactgtattagcagagtttgaataagtacttaaaaataaggacatgtttttcttctcactgtagtacatagagtactttcagtctacctagagatttctaagtttattaagaaaatgtttatcctcattatactgtataattcacaaatcagttgagtaacaacatagaaagcaaatcgcaagttccaaaaacattagtattagtactttagtgcaactatgttggtctgaacatctctagggaaacctgaaaccttcaactgagttccagataatgaggaaactgccctggctgtttaaggggaaataaaacaaaaattgtactcaagcctgtggggggagagaatgccactacaggggcagtaagggagtttaagaaagcaaataaagttccattgacttggctttgctttggtgtttgtatgatcaggattacatacaatttaattcagtgactaacagggacaggagagaattgttaaaggagaatctttcaacagatttttttttaataaaaatgaactgaactttcagagaagtttggtcatatataaccaaatatggaacctgaatatagaaaatgaaacaaagataataaatcagttatgaatgctttttaagctataaccatatgaatatttataaccaatgaggaatattgttactgtaccatataagctttgtttccctagttcctaacaatttaacttttattctagttgcaaccataaggaaccaaattatattgccctgtggtcatcaaataactttgaatctttctgtaggactgactctaccacctaactccaaaatgtagagattgggtctcactatattgcccaggctgctcttgaactcctggcctcaagtgattgtcctgccttgtcttcccaaggtgctaggattacaggcatgagccactgtgccctacagatagcttgcttctaaactgtaactttctaaagagtaaaagccatccatatgaaatttattttcatcaagtcatgatcacttattattatcattctatatggaattctaagataccgttaactctggactatatcactggctgaccttttgacttcatagcttttattaataatcttttagaccttgtttacaaacttttaaatctgctttcagacatttagtttcttcagaaatgtattataggatattctgatctgattttcatatgacaaaatttaaattcagagatgtttctattttccaccccatcctttttaggttgttctattattaagattctgtgtggtgtttactctttaacttagatctcaaattcatttgactcaatagttgatggataaataatattgaaaactatcttcagtcaattgttttgtacaatgtttgtgcctttactgagctagtgttaaaatgcccctttgtacacacacgtacataaataatacaaagatatacatacatattgtttgtatataatggtattagagtattcttttttaaatttttatgggtagatagtagatgtatatatttatagggtacatgagatattttaatacccacgtacaatgagtaatatcaggatgaatggggtaaccatttatcctttctttgtgttacaaacaatccaattatgctcttttagttatttcaaaatgtacaataaattattgttagctgtaatcaccctgttgtgctattatcaaatactagatcttcttgattctatccaactatatttttttactccttaatcatcccctccctgccccaactacccttcgcagcctctggtaaccatccttcttgttaagtgaaacaagccaggcacaaacaaacaaacatcacacgttcttacttatttatgggagctaaaaattaatacaactgaactcatgaagacagagagtagaataatggtattagttcttgatggaaatgtcccttaaagatttttctggaagatttaaaggctggggtaggtaatttaacacttacataacatgggaacagttatcttagtaggtatgctgtcatatccaagaagtttgaaaagctgaaatttgttactcttaaaacagctcctttcacatgttgtcacttttgacaattgcttttgggggtcaacttttcatgcatttattctagtgatgataacagcaatcagaatattattaaaacttttgttttacattactttaccatggtataagaggtaaaaatgaagaaggcatagtacctacttacaggatagttaaaacagatacacaactaaaatacaattcaacatataaccaattttataaaagctacagaaccaaacttgtgggttgtcagaagagaaagtgagagagaaaaacttttaggaagaaggggaggtactgtggcagtcttcattgaaaggagttgaaatttgagctgggtaatatttttcaaaggagagattcaggcaggaaaacattccaggtgttatgcttcttcaaagagggcatgaaagtgaaaaatggtcttgtgtcattgtcactgagttgtttgtatccagcacagtgtctggtgtataataggtgttcagtaattatttgtcacccctcactcattctatacacaagaattaactcaaaatggaccatagacctaaatgtcagagccaacattatacaacttttagaataaaatatgattaaaccttcatgactttgggttaggcaaagacttcttaggtgatgccaaaaactcaagtgacaaaagaaaaatagataaattagacttcatcaaaatttaaaactttgtgtttcaaaggatgcaattaagaaagcaaaaagacaatctacagaatgggagaggatatttgcaaataatccatctgataagggactagtatctataatatgtgaagagatcaataataaaaagataatggaattttaaaatgggcaaatattatattttgtgaactggttctgtggcttgtgacctgtgtggccttaagtatgtcattttgcctcactgggcctcaattaccttttctgtactatgatggccagaaccaaaaagacaaataataatgagaattgaacacctggggttcttttgaggattaaatgaatgaggtaggatccttggcatgaagcaagtgcttgataaggttagctattacagttatgccatgctgcctatgtgtgggagagacagtctgggaccacaggtgttagttcagaagatggaactgtctctgagctctttagtgcagaaagagcttctgcaggaggaggagtggtgtgatattagatggagaggtagagatcacaacagccagcagtcactaactacaggtgagcagcaacatctggaggattttctaatctgtctgggaacatctgggtagttacttgacatcacagcgtgtacctgaaccccaaagatggactccctcttcccagggtgcttcctgaccttggaattcccaaggtcaggcatgtccaggagccccagaaataagccaaaccagagtgaccaccaagaacaaagaaatgggggccatgttggcaggcttcctgtcaaccagctgcttttcctgaatgccaggcatgtgccaggcaccccactttaggtgaggcaaagactttaggtgaggcagagactggccagatgctccacaaaacccatttcctctccctgattacacagcaaagcaacattttccagctcccttgcatctaggaggggggcatatgactagctctaagtcagtggaatgtaggtagaaatgctgtcttccacactttttttttttttttttttttttgagacagcgttttcactctgtcgcccaggctggagcacagtggcatgatgtcagctcactgcagcctctgcctcctgggttcaagcaattctcctgcctcagcctcccaagtagctgggactataggcatgcaccaccacgccctactcatatttgtatttttagtagagacagggtctcatcatgttggccaggctggtctcgaactcctgacctcaggtgatccacccacctcaaacccctgaagtgctgggattacaggcgtgagccaccacgcctggccattttttgttgttgttttttttgaggggggggcgtggtttgagtgtgtcttccacacttctcttttctcatcatttgctggctggttgcaggagacccagtgggagattccaagttcccacaggataacattttctggatccctggatcctctcacggaaggccaactgagcatcttgttggactgtgatgcaagttagcaataaaatttttactgcattttttaaatgggaaaaatcttaatagacatttttccaaagaagatataaaaagtggccaattagcacatcaaaatatactcaacatcattggctattaaggaaatgcagatcaaaaccatgagataccacttcacacatctattttgatggccagaataaaaaggcagataataacaagtgttggtgaagatgtggagaaattagaatcctcatgtactgctcatgggaatgttatatggtgcagccattttagttcatcagtaattaaacacagagttgtcatatgatagagaaatttcatttctgggtttacatacaaatgaattgaaaacatatgtctacctgaaaatgcgcatgttcatagaaccattatttgcaatagccaaaaatggaaacaactgaagtgtccatcagaagacaaatgaataaataaaatgtggtgtatccataccatgtgagataccatgtgagatactactagcccttctcagtgcatcatacgataaaaaggaattaaatgctgatacattcttaatcatggatgaaccttgaaaacattatgctaagtgaaaggagccagtaacaaggccacttattgtttgatctcatgtatatggaatgtccagaataggcaaatcttatagaggtagatagtagatgccttagggctggagtgtgaagcagaatgaggtgtgactactaatgggcacagagtttattttgggaggtgatgaaatgtttcaaaattaggctgtggtgatatttgcacaactctgtgaatataccaaaaaccattcaatcatactttagattggtgaagtatatggtatatgaattgtatcttgatgaagccattgaaaaaaaagtagtgctttgagcacggggggaaaaagagagctatttgttgggtgtgtgtactagtagataaagatcagcatggctagcattatggcacaaaggtgaatgtaggaaaataaatcttgtactttgaaataattaatattttaaggaggcaaaatatgtttgagtgatttgactttagaaactgcgaaagtcagctagatatgcagttccacaaaggtgtgtatattcttcaaccttgtttaagaacaaaaaatagaaataagcaaaatatccctcaataagggacttattaaataaagtataaattcatccaatgcagtattctacagctattttttaaatgaaatcaatctacatgggtttatatgaaaagatacccatgatatataaaccagtaagaaaaatactttatagcatgtagtttatacatacatgtatgcttgaaaattatgcattaaatttttcaataatgcacaactattaaataatggttacttctggggagtcagactgaaagatctcaaagaaaaaagaataacatactttttactttatattcttctttgtaggtgtagatcttgaatttctgtcaagtatacatgcaacttgctttccctccattcctccattaagataattttagacttatagagatgttttaaagaatttccagctgggcgcattggctcacacctgtaatcccagcattttgggaggcagaggcaggtggatcacctgaagtcaggagttggacatcagcctgaacaacgtggtgaaaccgtgtctctactaaaaatacaaaaattagctgagcatggtggcacacgactgtaatcccagatattcgggagactgaggccggagaactgcttgaacccaggaggcggaggttgcagtgagctgagattgcgccattgcactccaatctgggcgacaaaagcgaaactctgtctcaaaaaaaacaaaaatgaattttcatatatacttcacccaattctcccttttgctaatatcttacatgatcatgtaacatttatcaaaataaaggaattaatactggtacattactgttaactttaataacaatctcattcagattttacaattttaacattaatgcctattcttttctgggacccaacccaggatcccatattaaatttccttgtcatgtctcctaagtctttcttgtctttcatgacctcaacacttctaaagactactagtcagttattttgtggaatatcccccaatttggatttggctggtgttttctcatgattagattgaggtcatgcattattgacaaggattgggaagaggtgagcccttctcagtgcatcatactgggaaatacatgatattgatatgtattactggtgaggtttaccttgaccattttgctaaggtgaggtatgccagggttttttactgtaaatttgttatttttctctttgtaatgactatatattttggggagatactttaagactatgccaatatcctgtttctgcttacaaattttcccacaaattttgaaatccactgatggatcttgcctgcagcatatatcactgatttactagtgattttctttttttctcattccttctgccattattaatagaattctataaggaagagttgtcacttctccctcgtgtatttacttattcaattatttatttctatcagtttggacacatggatccttgttttattctgtgtgttataaccaatactgttattattctgttgctcacattgttccagctttggccattgggagctctttcatgttgtgtcctctgccctctcagtttactcttatctttttttgagaccatcaagatgctccagttcatcgggtattttctctgccccagccctggaatcaaccatttctccaggaggatcatgaaatttggatcaagatctttatatttactttcatattgaagaaactgtgtaaaacagagccaaaccctgtgaataaaattggtgaacatccctagcacaactgctttgaacttaaatagattccaagccccacattgattaggtcccagtgagtttcttctttagtgcaatcgatttttttcccaggtttatgagtcataataaataaaaaattgtatattttggagtatatgacatgatttgctatatgtattcattgtgaaacagttaccacaattaagtcaattaacacatccatcaccatcacctcacatagttaccattttgtgtgatgagaacacttatgatctactctcttagcaaatatcacgtgtacaatacagtattattaactacagtcaccatgctatacactgggtccacagaacttactcatcttacataactgaaagtttgttccctgtgaccaacatctcctttcccccaccccctggcaaccactgtacggctctgattctatgattttgacttttttggatttcacatctaagtgagatcatgcagtatttccctttttgtctctgtctcatttacttagcataatgttctccaggtttatccatgttgtcgcaaatgataggatctccttatttatggctaaatgatattccattgtggatatgcaccacgttttctttctccatgtatctgtcagcgagtacttaggttgtcttcatatcttagctgtagttaataatgctgaaatgaatatgcaagtgcaaatatagatacctcatttcctttgggtatatacccagaagtggaattgttggatcatatggtcattctatttttaattatttgaggaacctcctgctgcttttcataatggttgtaccaatacaattgattttaaaattcaagcaaagtctgtagcgagtaagcaaactcctcatcccccctgaccctaccacttttttccttatgaaaagccaggcctgactttgacataagacaaccaattttcgtgcttgtgttctaacttggctaggacctgagagttccaaaaatgttctgagagtgattctaaggacaatattgagttggagggctcccctcttttttaaaacaaaaacaaaacattccttcatttttaaactgaaggatcgaatgaaacactattgccttttcttacttctgaagaggaagatcgttctgtcccttcttatggaatatggtagaatattatttttaaggacttttaaaaaaattattaaaaaacttttatgttccttcgtctctctggcttataaaaagaaataggatgtgtttgcattgaaatctggcaatgattaattaactttctaagtgaagtttaaagaatacagaaaaaataacccatgcatattcagtagtaacgtgtgatagatttctaaaaaccagtgatcacagtttctttccccctctttccattctagtgaaaaagtttttacttcctgctgcatagagctaatataaaaacaccttttcctgaaatattttaaatttccttttacttatttgagaaatctttaattttctgtttgctcagatcttgattgtttttcattctgtttctccccttctgcctgttcatagttcccaataggaagaaaagaagtctcctatttggaattttctttgatttatccttgatttacatggcaaatagaaagcagctgtctatttaagcatctaattcttgaaaccatagtcccctcaagcgtcatctggaaataatgtagcttgtaaaacaaagctaagaagaaaaggcaatgtttgttttatgtgggatgaatgatttctgttggggtcctttaattcggctattatgagggttattaaaaagcagtattacaaaagaggcttaaatgaaaagaattttttaagctggtatcttattattacagttgattatagtcaaagctacaaatgttttataaatgccactttatttgagtttctctaaataagacccccaaaaccagtaattttattcattgtatgagtggaaattcaaccctttccttggttgatttaatttctgaaaacaaattgtattcgagaattcagctctgcttgtttttctggaaatttcacggatttctgacaaattcatgagaagaatccttaacaggagtatttgagaattaccttataaatgcagagaatgaacatgaaaagcatcagactttatctagacttaagatattattagaaaattcactgaacactagataaagttaagtcctaaattgtttcttaatttattcatgaattctttgagtttctgagatagaaatttggagatcttggtaatgggcagtggtatactttgggaagtaggaaggccagttgatttgtgctttgatggttgttggaggtcattccatgattggaatgtgttgattttcttgatttatttgttattacaacaaagcagttattcttggacagttgacatttcagaactaaacaatccttaaatatacttggaattacagaaatggaattacttggcacgtttgtttaataatcaacagggcagtcctgtttaattattttcacacatttgagtcacctgtaatctctcccctaatctcttctatgatcttaaatttgcatcatgcttgacatcatgaggaacattgttgctcagaaacatatcctttgtcctttaataggcagtgctagctaatcagtctggttgctgaatgaatgatccatcttctgtagggccatgttttaagcctgtgttagtcagctcaagatgccgtaacaaaatgtagactgggtggtttgaacaacagaaatctatttcctcacagtccttgaggcagaaagcccaagatggagtgtcagcacagttgggttctggtgaggcccctcttcttggcttccagacagccaccttctcaatgtgtgctcacatggccttttgttagcatctatgttagcagagagaccaagagcaagctctctggtgtcttttactataagggtactaatgtcatcagactaagctctgcccttatcacctaatctcctcccaaacaccccctctccaaatatcattacactggggggttaggccttcagcatatgaatttgagtgggaacacattcagtccataacaaagcctaaacagtactgagcctttaataatcagatatgatctctcttaagtttcatactagttaatgaattccagttagactaacttttgttccattagtagtagtgctttaaacctctatgtgaagtaactcattaaccaattccaagtcctaaatttcccatacccattatgaatgcgctataagttataaacattctccaggttaccagttttaaatagcaattgtgaaagactaatgcaagtataaaaacactttgtgaggctgggtgtggtggctcatgcctgtaatcccagcactttgggagaccaaggcaggcagatcacgaagtcaagagatcgagaccatcctggccaacacggtgaaaccccgtctctactaaaaaaatacaaaaattagctaggcatggtggtgcgcgcctgtagtcccagctactcgggaggctgaggcaggagaatcgcttgaacccaggaggtggaggttgcagtgagccgagattgtgccactggactctagcctggtgacagagcgagattccatctcaaaaaaaaaaaaaaaaaaaaaaacactttgtaatggtgcttgaaatttcttactctttcatccaacaaatatttagtgagcagcttctatgttctgggcactgtcctctgcccagtgacaataaaaaatctctgctctcatgaagcctctgttctaatgtaaggagggatatataataatttcatacataggtgaatgaatgaaaaaattaataaaatgttagaagataacaagttccatgggaaaataaagcaggatgaagagattgggagtgttgggaattggaaggtagcagtgcatatgggtgatcagtggagcatatatctcatttagaaggtgatagttgagcaaagacctaaagcaggagagggaatgagctttgtagatatctaagggaagtgtgttctcatggaccagtatggtccatgggctgttggaactgagccacacagcaggaggtgagcggcgggcaagtgagcaaagcttcatctgtgttggcagcttctccccgtcactccattacctcctgagctccaccacctgccagatcagcagcagcattagattctcataggagcgccaaccctattgtgaactgtacacgcaaaggatctaggttacacatgccttatgagaatctaatacctgatgatctgtcacagtctcccgtcacccgcagataggtctgtctagttgcagaataacaagctcagggctcccactgattctacatcatggtaagttgtataattatttcattaaatattacaatgtaataataatagaaataaagtgcacaataaatgtaatgtgcttgagtcatcccaaaagcaccaccctgcatccgtggaaaaatcgtcttccatgaaacggtccctggtgctactctaataaaatagagcagggagtgcaaaggctttgaggcaggagcctcacagacccctaacaaggtaatggggctggaaaggagtttatctgaatcttgtttataatcatcttaaacaaatgctaattgaggaatgatccagaaaagttttggatagagtgacagactgagaattagaagacctgagttctgtttttaagctaactttaatttactatgagcttgggcaacttattttgccattttgacccttgattttcttgtatttaacatgtatcttaaaggcttggtgccggggcttgcacctgtaatctagcaatttgggaggctgaggcaggagaatatcttgagcctgggagttcgagaccagcctgagcaatatagggagaccctgtgtctacaaaaaattaattaatttaaaaaatgttaaatatatttttaaaatgtatcttaaagtacattttctattttctttttttttttgttctttttttaaaattatactttaagttttaggctacatgtgcacaacatgcaggtttgttacatatgtatacatgtgccatgttggtgtgctgcacccattaactcttcatttaacattaggtatatccctaatgctgtccctcccctctcctcccacccaacaacaggccccggtgtgtgatgttccccttcctgtgtccatgtgttctcattgttcaattcccacctgtgagtgagaacatgcggtgtttggttttttgtccttgcgatagtttgctgagaatgatggtttccagcttcatccatgtccctacaaaagacatgaactcatccttttttatggctgcagagtattccatggtgtatatgtgccacattttcttaatccggtctatcattgttggacatttggcttggttccaagtctttgctatcgtgaatagtgccgcaataaacatacacgtgcatgtgtctttatagcagcatgttttatactcctttgggtatatacccagtaatgggatggccgggtcaaatggtatttgtagttctagatccctgaggaatcgccacactgacttccacaatggttgaactagtttacagtcccaccaacagtgtaaaagtgttcctatttctccacatcctctccagcacctgttgtttcctgactttttaatgattgccattctaactggtgtgagatggtatctcattgtggttttgatttgcatttctctgatggccagtgatgatgagcattttttcatgtgtcttttggctgcataaatgtcttcttttgagaagtgtctgttcatatccttcgcccactttttcatggggatgtttttttcttgtaaatttgtttgagttctttgtagattctgtatattagccctttgtcagatgagtagactgcaaaaattttctcccattctctaggttgcctgttcactctgatggtagtttcttttgctgtgcagaagctctttagtttaattacatcccatttgtcaattttggcttttgttgccattgcttttggtgttttagacatgaagtccttgcccatgcctatgtcctgaatggtattgcctaggttttcttctagggtttttatggttttaggtctaacatctaagtctttaatccatcttgaattaatttttgtgtaaggtgtaaggaagagatccagtttcagctttctacatatggctagccagttttcccagcaccatttattaaatagggaatcctttccccatttcttgtttttgtcaggtttgtcaaagatcagatagttgtagatatgcggcattatttctgagggctctgttctgttccattggtctatgtctctgttttggtaccagtaccatgctgttttggttactgtagccttgtagtgtagtttgaagtcaggtagggtgatgcctccagctttgttcttttggcttaggattgacttggcgatgcgggctcttttttggttccatatgaactttaaagtagttttttccaattctgtgaagaaggtcattggtagcttgatggggatggcattgaatctataaattaccttgggcagtatggccattatcacaatattgattcttcctacccatgatcatagaatgttcttccatttgtttgtatcctcttttatttcattgagcagtggtttgcagttctccttgaagaggtccttcacgtcccttgtaagttggattcctagatattttattctctttgaagcaattgtgaatgggagttcactcatgatttggctctctgtttgtctgttattggtgtataagaatgcttgtgatttttgcacattgattttgtaacctgagactttgctgaagttgcctatcagtttaaggagattttgtgctgagacaatggggttttctagatatacaatcatgtcatctgcaaacagggacaatttgacttcctcttttccgaattgaataccctttatttccttctcctgcctaattgccctggccagaacttccaacactgtgttgaataggagtggtgagagaaggcatccctgtcttgtggcagttttcaaagggaatgcttccagtttttgcccattcagtatgatatcagctgtgggtttgtcataaatagctttctattttctaatgtggttttttgtgtgtgtggttgtttttagcttcagcattctctcatttcatcatttccttgaggttaccctggatataaagaaagggatttaggatattacttcaagtcagatgctgggagagaaggaggaggaagaaaaggaggcaattagctaatttgaatattacatatggtagggaatcaatagaaaatgacaattaaactaaggggactagggagttatataaagttattcatgtaaagggaactattagaacaaatatataaaccttcctaaataccaaaaaaaaaggtaaaaactaaaatataaaaagaaaacaagtaaaatagaccacatattgaaagactacttgcataaaagacttgaatacatagacatatatataaggacattaaaaacaaacagataaatcttctacctacagctccatcagtaagaatttgttgaataagctttggtacattcacacaagaaagtattataccatgcagctataaaaatgaatgaaaacatctccatatgaagctctatatgccaccacataggcatcctcgggacaggttgatactcatttgtatctgtttatattttggaaacaaataggggaaggacaaactatagaaaaaattgttaaacagttacctataaagaaagtgaagaaattgggtaaaagtgaaagaggaatgaaactcgacttctttgaatattttttgttctttgatgtaacttaagaactccataaatgttttacatgattatgaaacaaaagtttaaaggagcagtgtctaaaatttaaataaattgaaatcagtgaacctaaatatatatccatttggtggcataactgaacatctaagtgactattcctagtaggctataccttaaagacacaattgaaaaaatagtttttactaatgacatttgtatagaaacctttatattgttacttcaagacgggtgtaatgtgagtttaataaaacacattagtaattgtgaaatattctaattttgttttcccattggggacctatatttgtatattatatatataaattatatatatatatatatatatatatatatatatgaatttttttgagacgggatcttgcactgttgcccaggctggagctcagtgtgtgatcatagttcactgcagccttgaacccctgagctcaagcaatactcccgcctcagcctttcgagtagctgggactataggcacgcatcaccacgctcaactaagttttttattttttgtaaatgcagcagggtcccactgtgttgcccaggctggtctgaaactcgtgccctcaagcagtcctcctgctctagcctcccaaaatgctgagattacaggaatgagccctgatgtgcctggcccaggaacctaggttttgacatggaaacattatatgcagatttaaaatagaagagattaactaagaaccctttgatcttgaatttgaataggaagtacctgcatggacttatgcttttgttgttttaatatttatagttatgtctagtcattctacttctgtcctttgaactcattgtaacagtgaccaacccaataacagctttgagcatctgtaacaaccagatttctactaaaaggaactggggatttgtcctgcctttcaaataagatagtaacactagatgtcaaaatagtagatatggagaagttccactttagagaaatattcataattgaaaaagaaatgatagaattagaatatcactattttgcaaaccctaattagtagattcgagcattgagcattagtgactgcaaacttacgtaaagagggaaccatagattatgtttctcctgatgtagaacacaccaccatctatgaagtagtcttgcaaaaaaaaaacccaaaaactaatcagaccaagcctctaaatttagctaccaattttctggggaaacccagaacagagaaaaattaaacatcaccaaaatccaggatgcaagaatctatataggacaaataacctggtttcttcaactaacaaattgcaataagaaaggagagagagaaaaacacattaatgaagaccaattacaccatagagattttatttgaattctcattctgcctgtaagaaactttttttaaaacctaattagaaagttgagcactggctggatatgtggtaattttcagggattactattaattttttatgtgtgaaaattgcattgtgtatattttttaaagaatctttatattttagagatacttaaccaatatatttatggttgaaagatttgtttggactttgcttcagaataaccctggagaagaggaaatgaatgagtataaggaaacaagattagccatgagttgatgggctgggtgataggtacatggaggttcattatactatcctgtctgtctttgtatatatttgaaatttctcgataaagaaagttacagaggttatacagcgtatgaatatgcttggcgtcactgaactgtatactcaacagtggttacaatggtaaattttatgtttatttcaccacaatttttttaagttaaataatatgagtattggaatcagaaagaactatatttaacctttatgtgaccttgaccttacttaacctctctgatatttggttttctcaacagttaaataagaccaatatccggcttgccaaattttatgagaattaaattaaatactgcatcgaaagtacttagcaaaatatttggcatataacaagtactgtgtaaatattagtgaccttaattactaccactacagcttctaccacctgaaagataggaagatatgccctttattctcttatcacctaaaaccaaagcttattactgaggaaggctgtttaaaattctcttttcattgcactgtggcataaaggaataaacttacactgcaagtcagacagacttcactccccattttaggatttactagctatgctgtgttggttagtagttaccttagagaagttactgtgctctcatgtataaagtgagaatactagtatctactttccagaattggattgaatattaataattatatgtgtaatgttcttggcataatgccatgatcatagtaggttttcagtaaatgataggtatgatcatatgattgtattcaaatatgattatcattgttcaggaatggaaagtaagaaaaggtcttttccatatattcttcctgaacgaaattgatctgaacatcagaacaatctttctgatttaattacgggctttagaatatattattaaatggtatctattttctcaattttaaacatttataactttatttaactggggttttatcaatagcaccttatcatctttcctattagggggatgataagttgctactgtgttggtgattgcagcagattaaaaataactggtaagtgatgcccagggttaacctattctttggtaagtaacttgaaaattttataccaaaaaggacttgttgtttaccagatgcaaatagataaagtactctgcctttccctttctctactggagattcaagtccaacagagatgaagtctgcatctaacagaaatgtttttaaaacagactctggaaattttttgtctggaaagagacaaaaaaagaattgattgtagaaaatctgtattctcaatacatgagtaatgtaataacatgcatcctctttttcagaatgaaagcaaacccttcaaattctcatttcttaagtcattggtaaatcacttcatatgtccaagcttcagtttccccacccaagagcaaagactctagattagaaatatctggatttgaatcctagttctgtctcttaatagccatgtgacagtgaggaagttacttaatccttttgagtttcaattctacatctgaaaataaacacaacactgtaattaatttgctataattaattatcttttaaatagagtagatatagtagatgcagaagcaaaatatggaataaatacaaggaaaacatcatccataaatatgtttaaaacatattggccaggcgcggtggctcacacctgtaatcccagcactttgggagaccgaggtgggcggatcacaaggtcaggagatcgagaccatcctggcaaacatggtgaaacccctgtctactaaagatacaaaaaaaaaaaaaaattagccgggcgtggtggtgggcgcctgtagtcccagctactcaggaggctgaggcaggagaatggcatgaacccggggggcagagcttgcagtgagcggagattgcgccactgcactccagcctgagtgacagagtgagactccatctcaacaaaaaaaagaaaacatatttattgattttattcatgtcatattttgtcccagacattgagtccatagcgatgaataggcagtcatggaccttgcctcaagaagctagtggagggaaaataaacatcatttagcaattaaaaatggagctaaaataacagggacataatgcaagagaatcgcaagaatcctgttttagatttagaggcttaggattcaggggtttgctctctgagaaagtgatatttaactgagacctgatgatgaataagagttgccagagaaaaaatgaggatagagtgtttttaacagcatgtgtgaaggcctgaagcaggacggagctctgtttattcaagaaactgttagcaggccagtatagtttggagtgtggatagtgggggagagtagcattaaatgagtatgaaggaataggtcattgtagggctatgttcaaggcctgatgagcccatttacggtaaagagtttggaggttagccatagttcagcataaagtcattgaaggattttgggcactagagtaacctggcctgatgtacctttgaaaaaagcactgtggagaagtgacttaaagggctaagtgttgaggctgggagtccagttgtcaacatgctgagagattacagtggcttggaactcaagaggaaaaggctaggctgcagatggaaacataggtgacatcagcataaataaaatgttcggagtcatggcaattgatgaatgaacaatgggaaggaaagagggataatccagagctctgagagacctccaaccttcagaagctgggtggaagagaaaatgctaacaaaaggaatcagaaaaaccacaagagcgtggtgtcaggtaggtatgtcttaaagtggaagaaatagtgaacaactatacatggaagattgagggtaagatgaggattaaaacacatacattggatttggcaaaacagaggtggtgtctgggcatggaaaagtggggattattttgaatagtataaactgacaagtagctagattaattaatcatgagaggattctcttagggaataggttttttagttgaagtctaagaaagggcatgaaatttattattctcattctcctatttagcctgtctcatcttaggatatgtccatacccctgttcctgttttttagccaacccaactttatgaagttcttgtggagtctaatgataatagataaacttgtttaaaatacaagttttatatcactacattaattaataacagctcataataaaccttatagttgctaaatgtcttgactttttaaaattcgtatcagattttaaattaagttatgcttaataaaccaagtgaaaaatactaaagtcaaagtgtattactatatcttaggttataggaagctccaaatggcctcatcataacactggaattatttccatgagattgcaggatgtatttaagtatctcttacattatataataagccttgcagtgatcagcccatttcaaggaaatactccttgcaagtatgtataaatgtgtttctgctttacaaatgtttgtcattttcctatcaaaaactatagaggaagaggttttgagaactgagtacaaatgaggaaaatgaatgctatgtggcaaaggatgacaactgtgtgtgtgtatgtgtgtgtgtgtcttctgaaaaagctttagactttttttctttttaatgttttatcctagcctttttactattatgttacttatgtagagccctctgtccattgagttcaaagcacttagaatcatcaagtcatttattttttgaatttattgaatgggtgcccattgttcaaaagcctgtgggcgtaagtacagagttataaaagcacgcaaattaaatgtaatggcacaggagtaagagagaaagccagcaggattaccgctgtgcctattgggaatgccacactcttaaaaagaaagaaaagaagagaagcaaaagagaataagaaaaggaaaaaaccaacaacctaggattcatcgtgttctgagagttaaaaaacaaatttgtcagtcaaagggaatgaccatggggtgcagttaagagagtcctaattggatttgcagggcactctgaaaatgctccagcactcacagacccagattttcctctaaaaactaagcctgataaactattgttctgttttcttcattttaatgatagacattcagatataaggggatttgcttaactgccattgtctcaaagcagtatcgtaaatttgaagcatgatcttattctcagattcccagttaattcttggttttgtttctttcagtcatttattttagaggaatatccattacattttagttgtctccctcaaacagtagttttaaaaatggatattttcacagtttagcatatcagtaaaacttagtaagctccttctaaaattaatttagaagagggaatgcctcgttttttaagagtaagaagtcaatagataattgaaaattataaaatttaaaataatagtacacattatttcagaataagaaagcaaatgttggaggaaatagaaaaaatggttcaaagtatttgcctctaggtcatggatttggggaagggaaaggatggatcagagggctgctctttttctgttttaagtctagtaatcttgaatttcaactgctctcttatcactctgataaaaattaaaattacaacaaaagtttaggaaaaagaaaaatgagaacaggaaagctattcctcatgtacaataaatttttgaaatcgttttcaaaactgagcttaatatattattttctaagtattagtctgtacagttaataggttcatcagcaccctccctctctaaagcatagtctaactctcggagagattggctataactgctaataaattatgcattccacaattaggccttttctcctatttctggtattactcctcatttaattggaatttctaatgacgcttgactgaaactcttgaaagtattataacatgaagacttaaatcggacacttcctgtacttctgtattcaggtctcagtctaaatcgtattaatacttacctatcctcccttttctctgctttcatagcatttttcacaattttcagttctcccctactggactctaaattccagttagtacagtacctgttcataatgccactgtttagtatttgttaaataaatgacacatttcatctgggaatattgtggtgtataactgatagctattgggagaactgattaaattgcatcaattagcctgttaatctgaagacgttaataaaacctccccacctgcctagattacattgaaccaaacctaccaaaaccagtaaattacagtgaaacagagactgctgggcaggtattaagtatccatgttatcaaggcccctaggaggtggagggaatattccgatagcaactgttctgggatcttttgtaaaaggcaatttgcaactgtggttttttgtgtgtgcagttaatgcctttttaatttctccctctgtgtctttgcctttcagttttcttattcttgttgttcagcatgtctgattcctcatccaatttactcaaaatttaattgacataaagctgaagccatttagaaggttataatcattcttttatttgtcttgttgacataccaaagggttagagttagcagtgactattgaataataaccagtaaattagttcagatcatggcacggcatgtttcttatatataaatcacatacataaaaaaagaaaaaccccttcctaaacattttgcttgatgaggcaattttattaagaaggcaattagattacacacattggttttatactaccattttcctattctttgggcatagagatttcttgttcacctaactcccagtgtaaaaccaaggggtttttagaactattttaactgatcattggctttattgatgaaatgtggcagagattttctagttgcttctgtgcacatttaggcgcttcccaaggttaaatgagttgtgttcactacaaaacactttctgttgctccctatctctgtgattggtgctaaggtggtgtgtacagtctgtcccactggaactggtgcctgtctcatgacatctctgactttggatcttagggaaagtatggtttgcttttaactaaagaaaaactatctgttatttataaacttagaggacagctgaccaaagagaattatggccaccctttatccaatgctaaattatctacccttattgttctttcttaatattcctactaaattaggggatggcagggtttctagagtcaaaggcaaaaattcagtcttaatcaacatggttgattatacatttctgtagcatttacagttaacaagtcattttcaaattagttctcataaaggcaggcaagcattatatttctacttaacaaaagaaaagaaattctcagattaaatgagttgctcaaactctgaggtgattatttagcagagtcaggtctagaactgaggtcttttgactccctgccagtattctttccatgtcaccaggacaggactgagaaagtgttctgttactacttgccaagtgtgaggcctgtactgagtgtgttatttaactcattcagttctcatggcaccaccatgatgaagtaggtcggtgcaggaaggaaatgtctacttgtcacgttggtcatagcagaagatatgctgtggtggtcagttcagtgtgttctggtgataggattgtcctatgcaaatgttacaaggtccacacattgtagaatcagctgcatcttcattctgtactgtcactatactttgataagaaatgctaccaagtaaattttagctttgttgccattgatactagtatgagtactcaatgttttcttgttatagtgtattcattaccataaaatgtcttttacttgcattctgtgtcttcctcttaacaaaatcttttccttatacccaaaccattatgagtggattaaagaaatgcaatagaagaaaggagggagttgggtagggatcacattccttcttgccaagtaaactttgactgagaacaccctttaatagcattttcctgcatttctacattaatatcaacttttctttgcctcaaaagaagaggatttccttcatgcctgattaagagtatttttatttctggttttatattttacatattgagagttgtttctacacacttcttcccaagaagactctcaggaaaataaaattaagcatttgtctcttccaaagaaattgacaccatatagcaaaatgacaggcagctcccaactcatggtgtaattgattgctagaatacgattcccaagtggagccgttttaagtcagacccttataaatattatacatattaagtcctatccccccagactaaattcattataaaaacacaaaaataggttacaacaaatgaaaagtttgtgttttaaaaccatgtaatcataaaagtagctaaaaattgggatatatatataacatatatgtatgcttttgggttcctttggggctttgaaaatgtaagtccagtgctatttggactgaagacatcttgttatagtaacacttgctgtagtaaggattcttcattacactctaaggactttcaaactgtttttaaaattagtttctgccacaggaaataaattgcaaatttaatacaggattgcctcctaaagttcttgaatggcagtggctgggccacagggagtttccatggcaacctcagtgatcccttgctctaattgtaccagcagactgagttagcttcactgctgttgaccttgactgactcatgagcattagcagttgtttggacaaaatgtaggcattgatgccattcattagacaaccataaatacaacttttggtcatgattgtgaactatagttataatgcagtgaggtttcaaagcaggctgtctccagtcagggttacctgtatttcagcactagacttaaaatattttttaaacatatacataatattttctcaggagattaaccagagtttagtataacaatagcatttaggttcttaaagatctcagattcacagcttagagcatttcattgtaatgtacttaaatgttctaaaattcaaatttcagcctgttggaaacacttctctgtaagaagacattaaagtacaagtcagaaaacgttagtttctcttagtgcctgatagccttcttatacctcctaaatacatctgtacctaataagaaacatttgttattaccattgcttttactagtaagagcaacaatttcttgagctgctcctctgtattaggcattgggataggtgttttgcatgttcattgtctcatttccactcttctgtaatagttttgttgataatgaaatcaaggttcagaccctcgcccacggtcatataagcagtaaatagtagaacaaggattcaaaggcaagtcataaggagcctggcctgttaactcttgtgccacagtgtttcctcttgtatatctggccaatttttcatacaactggggagtctttaatacacagagtagtagctcctgatttgaatctatgacagtagttttttgtgtcttcagtaaagttcagcattcttcaattgtatttgcagtattatttccaagtggaaatagtcattttttctcttttttaaaatgttgtttatttacgtatctggagagaagtggtttttttatgttttgtttttttccgagatggagttttgctcttgttgcccaggctggatcgcagtgacacgatatcagctcactgcaacctccgcctcccggattcaagtgattctcctgcctcagcctcccgagtagctgggattacaggtgtctgccaccacgcccagctaatttgttgtatttttagtagagatggggtttcaccatgttgaccaggctggtctcgaactcctgaccttaggtgatccaccgcctcagcctcccaaagtcctggaattactggcgtgagccaccatgcccggctgagaaaagtgtttttgatagatttctgccgtacaaaactagacaagattttataactccaaggtgaaataaatgacaaggactacatcttattttatgtccttggtatctattctcagtgcttaagacaatgctacatgtcatgatgttggcactcagctaatgtttgtgaaatcatcgtggttattttctattcattttattgtttgtctgtttcaataaactgaggatctgttttgtcaaattttgttaaactgtgaggtagattcacttatttccatgtagaaataattaaatcaagacagcattcgttttatgtattaattattctagagggaactttccttttgaaaataaaaattcctcaagcatattatttggcttttcactaacagttcaaaaaatgcatcctgtactattgcttttctattttaatttgctaattacttgaaaaataaagtgaggtgatatttaatgctgtttgaaacgtaatctccttataaaccattatgcaaaagcttactcctgctgcttcgctagaaatatcttcataaatgtctagattttcacccagtgaagttggatcattggggctaattggtttttttctccaacattttattattaaaattttcaaatatacaaaaaagttgaaaaatgttgcagtaaatgcccatatacctaccacccagattcttcagtaaattaacactttactggacttgctttattaccctctatttatctctctgttcttctatcaatcaatcaatccatcctgttttatgcatttcaaagttagttacatgatatctcattttaatagcttcatggtattgctttgtccagatgtactataatttagtcaatcatctactatcggacatttggaattgtggtaggtataataatagcccctgaaaagtgtccacatcctatccccagaacctgtaggtatgttaagttacatagcaaaaaggactttgcagatataactaaggttatggaccttaaaagagggacattagactggttattccagatgggtctaacctaaacacacaggccctcaaaagcagagaactttttgtccagccaaagcaggagagatgtaccagatggagatctcagagagcttcaaagctgagtggcatttgacttgccattgctggtttgaagatgaaggaggcaatgtgatggggaatgcaggcacagactccaagcttataccagcaggagaatagctctgcagctacaaggaaatgaatgcctctaacctgaatgaactcagaagagattctctccctgagctcccagaaaagaaccctgctcagctgacaccttgcttttggcctcattagatgcggaggaaccaaacctatctgaatgtctgcagaactgtgagacgacaaattttgtgttgttttaagcggctaaatttgtggtagtttgttatgacagtaacagaaaacaaattcagggatgatgaaaattttgaaaattttttgttattgtgcaatagacatccacaaagtaaatccgtgggcatggtcttatttccttaggataaatttctaatattagaattgtagggacaaagagtcttcacattttttaagactcttaagtacgtatttataaatgggtccctggaaaagtagtttcagattatactttcatcagtgctctgttgagaatgccatctcctttcttcttgacaacacagaattataatcatttgttatttttataacaaaaacaaatggcaaagaatgtatagcattataatttaacagacattgtttaactaccagcaaagttgaacatattttaatattttatctttggtaaattgtgtgtttgtgtctattgtacattattcttgcgagttgtttgtcaggaagcccctttctcctactttactaaaacaattttttatatgagaagtgcctattgacttttccctaattccttttcaaaatctattaagatgatcatgacttttttctcctttgaatatttactatgagtacatcaatagatttcctagaattgtactcttccagaattcttgaaattacttggattgtaacccttttagcacaatgttgaatttaatgttcatatgtttgagtattttaatgacggtttttgtttttatttttatttttcaactaactttaccaatttttgaaattatagttatgttacccctgtttaaggaagaacaaaatgagaaacgttctttttctctgatttagaaagcttaaatggcatagtaattatatattccttgaagatataaaggagtttactcataaaaccatatgaacccaacctccttttttaacagtgtgtctctgacagatttttcccttttttcatggttattctcttcacattttttatttgatcttaggtcaagttgaggaatttatagtttcctacacaatttttcctttatttaagttgtcaatgtaaaaaattttattatgaaaaagttcaaacatacacaaaagtagtttaatgaacccccatatctcattaccttgtttctgcaattagattttgtcatatatcctttatctgagctttttatttttcttgtgctgaagtatctttaaataaatcttgagattttactcctttatattttggtatgcatctctaaaaataataacattttctttcataatcacatatcattatcacatctaacaaaattagaaatatttcctaggtataatctaatgcacagcatattaacatttctccggaagtctcaaaaatggctgttggcaatgtgttaaaatcagaatccaaataaaattcacacatttggttgttgtgtctcctgtctcttttaatctagagcaatcctgtctttcttttttctcccatccaattatacggcagaaattgaaccatttgtcctgtagaatctttcacattctggtatgtccttttgtttccttttggtgtcatttaccttgttctctgtccctcatatttactataattaaagttagctctaaagtcttaaatagattcagattctcctttcttgttaagaatactgcatagctgggtactatttggttcacaaatgagaaggtatgattgtctcactttagtgatggttaagtgttatatactaaactgttttctccaaattaatatgttgaagccctaacccccaataagactgtgtttggagacaggacctttaatgaagtaattaaggttacacaaagatgtgccccttatccagtaggggtggtgctcttataagaagaggcagagactgggcgtggtggcttaggcctgtaatcctagcactttgggaggccaaagcgagtggattgcctgagctcaggagttcaagaccagcctggctaacatggcaaaaccctgtcactactaaacatacaaaaacattaaaaaaaatcagtcaggcgtggtggagcaagactgtgcctcaaaaaacaaagaagaggcagagacaccagagctcacttgctcgcttgcttgctgcttacagaaggccctgtgaggacacagggagaaggtggcatctgcaaggcaggaagattgaaatgtcctccatgtctgtagtcacattctctttgtcaccttaaagttggatatttgtgtttttcctccttttttcttccttcttgtttcgggttagcattttgtctgttgtttgtggtaagtattataataaccaccaagtaaggaacactctttatctgctacgcaagaccataaatagttttaaatacgttatttaatcctcacatcctctaaagtaagtagttctctcatttttctcacgggaaagctgaggctcaaaaaggttcagtgaattgcccaagggcacacagctaacatatggtaaagctgggattcaaggctgactccagggcctatgttcctactatttgtctatgtcctcctccccacaaaacccccaaccctattccaagtgctcccatagcgccttgtactttcacagggtgcctctcccctaaatggtaacctgtgtgagggcaggaacatgtctggatccccactccaacccagcatctgccatagcacctaccaagtcatacagtccattgtataattctaggaaatctattgatgtactcatagtaaatattcaaaggagaaaaaagtcatgatcatcttaatagatttgaaaaggaattagggaaaagccaataggcacttctcatataaaaaaaaaattgttttagtaaagtaggagaaaggggcttcctgacaaacaactcaaaagaataatgcacaatagacacaaacagacaatttaccaaagataaaatatggacttatggactcaggtgtctcattttctactgaatgccggacattgtgctaggacattcgaatccgaggttaaaagcatttatgcctgtaaatggggagacctttgcttttagactattaatgggagttggttccttcttgagcagagttgggttttgtgtcttcagtgcaccaccagcttcagattcccctagcagctctttattttatgcttaaagggtggagtctgcagtgtcagagggcttttttcagtgtttctttactactccgttttcagcagtcccagcagtagggctggagaagagacctctctgttgtcctagtccagcctcaatcctggagagtccctgtgtgcacctggatctcagaagtagacctttctctgcattcctgtcccttctccagtggtagcagacctgtgcttgatattggtatgcgtataggatcctgaacccaacttggtttcctgcctcaaatcccagaactagaaagttttttgcttttattcctctatcatcaggattggatctttatctatgtcctggaggtgagagagcttcctacctcttgttcaggggcagacatgtttctaccatccccctagagacaatgaaaatttgcctgtgctacaggccaagagggtttgctgccctgtagcttacggctttttcttagcatgagagaagagtcagggaagaaaatgagtcttggagcctgcccccagcagcagttatcacctcctgcaagcttgagcagtggtagaggggccctcttcagtcgcctgctccataccagcctttctcatgagcacctagtagaggatagtgagaaagaactcttaagtgaacataaaatctcttgcatctgggtttcaggtttcaagactgacacattagcctttaataattcatcaacattttagctgctttcttctttgccacttctgtggacaccacttcttccttgcatgctcagccaaaggtgaatgtttgtgttccttctttccttagaagaggtacttgaccctctttggaattcatttatctggttgccttgtgaaatcatattctgatgaacttaagaagatttaagatttattaagttacctggtttttttctcctcactaaggagggtcgttctttgttactttgcacatcctacacggaaactgaagtccaggttccttacaatgtgtacacacgtgacctagagagcctatttatcctacatttgaaggaaatgaggcctgtgaaagtgacgtgccctgtccatggcaaaactgggactagaacccaatctggagcttctctccatggacttggagctactctgtttttctttttttttttttttaacttgagcttattacacccctatttgtgaccctttactgccttttttggcatcactgactcttcttcccaagaaagaatgaaaaaagggcatcaagcgtcataggtctctgaagtcaatgtgtaatccatgacacacaggtttacagattatttcccttctgtttattaagagtatcaaagataaatagcatatattgaaaacagaagaatcaataggttccttgggttggagaatgattattttgaaacttaactttgtgcatttttacttataaaggtttttggattttcttcttcttctaaaaaccaataatgactctattcatggtggcagggtaatctaaattctgaattttcctgaagtttgaagttaccctgaatacgtttctattttaattacattttttggttatattaataaaatttactttccaaattcagtattgtctaaatactttatgaagctgagacttgagactaggaaggggttttaaaaaattatgtaagtacttatttttgcaaataaaaactgtaactcaggtgatgtagcaaaggtcacagctaattattggcagtgctgggactcctggatctcagatttgggatgagacaaggcactcagtagaaagtcaaagactttttttaaaaaagacacatcttcctaaagtattgctttacttagattttacttttcgtaggctgtggaaagggatttctttttctaataaaacaccaatatagtctaagaagaataaaaatgaacactaatacttaaggtaaaacattgaacttttaaaaacagaacaccaagctctggtacgcacttgtctcttctgctggcagtgggcctgaggaagggtgagaaactctattctgcaccccaagttctgtccactgcaagtggcctgctaacataatctgattgtcagaggctgcacctttgctggatttcaatcagaacactctttgtatgagttctctggctcttctccggatgtggaaaaacgtggctttagccagtgtaccctagcagccacagttctcttgtcactgcctccagtgcctttgcagtagtgtatgttaaagaacgactttccagagtgttgtggttgaggcttgtgggtcacattcaaaccacatccaaggagtgtagaaaaagaccacatggttttacatccccgcatgagaccagtggtgcggtgactgctgtctgctcaccgcctccccctcccactgctttattaaggttacccattgtctttttaggtcacaggatttattcttcagctctgattttatgtgtaatataaaacctgttctttctatcagaagctcagtattttggacaaatccagttctggctagaaataacatggccacaaagctttccagtgtgtgcaccagtgaattagcaacgtaaagataacaagagtctgtcaccaagtgattgcctttgaaggccattggcgcattaactttaaagagaactttgcttgtgcatttcctccccctactccccacttttggcaaaatcccattaattttgttgaaggttttattttctgctgaaaatgcaggaaatttagacaactctcttggaatccccccaaaactaatacaaacaagatacatatgcttctcttaaggaaactaaaaataaagatttgaaactatttaactgtataaattccctcttaaaaggaaaaggaagtttatagaatgagaggcaactctgactgctgttaacaaggtaaaatattcccacaatggccaacttctctatttgatatgaaattactacttcgcatagaatttgttgagctttcattcccaacatatttgatgtatcagaaacatctgaaaatgggatcattttcttgtttttacgtttgaaattgtctgcagtaaaataagtatgcccattttttggaggagaaagcctgtctgatatgagatctgttcctgttacagaagctgtaaggactaagaggaaaataccatggctgctccattgatgagctagcagattctattatggctgctccattgaggagccagcagattctacctctgacaaagctaattttgacacaatactgaggaaatacggttagttttcaaaagcgtgtcttccataaaatcttatttcataaatgcaagtcagtttttctatacattgactacttttataaattaataagagtgggattttggacttacatttaaaactaagaaacatgagttctgagttctttgcacttatagtaatttcaactttggaaagccatttatattttttatgataatgtctaaagctaaaatgatttttctccttcaaaatacttcgaaaatatgtttgtggatgttttggataacactcacatagtgcttaccatgtgttacacacagttttaaggactttacaaatgctgcctcatttaaaatttatgaaaaaaaatcaaataatattaaataccatttgaaattctgacacccaaatcatgagattagataacattttaggtctgtttaagtactgaaatttggatggttttgtaattttaaagaaactctccaaattcatgatttttcttctttttacaagtggtgattataacccaataatgcttttaaaaaatgaaacataaagaatttcatttattaccaaggatgtctgaaccagacatctaatcatagtagcaagttgaagattcaagtaactgggaaattatagttgttgagatagttttccttagaaattagaattagtcaaaaatttgatactttgtttttagtaaatcagaatctcagggtacataatttacccctctggctcctgattatttcatgatctgcttggtgccttgaagctgtagttgatcttccaacaccaatgggaggatccagagcatggtttccaggaaacgacttacacggtaggaattctggctgttccctaaaggataattaaagtagtggttagcagagaactgttgtcacttaaaaatggaaatgaattagttgcaaggattacaaatgtataaatacttatgtatcttaatggagataatggaatacacagcattacatctatgatcaaaacaatccaaatgctagacatctagcaaagtgcaaataaaatgatgagaaggctttaagccaggttgtattgagggacacttgaggttgctgatgggcttgagaagaagatgatagctataacagtggaatagactgaagactggcgagtaggagtagggcgacagacttctgccaaactgcaacagctttctgtactgcatagaaagaatgaggagcctttcaaaagtgttctgtattcaaggatgggctggttgaccacttgggatgaatgttatagaagggattctagcattaaggggagtcactttagtgtcttttgtatcttctgagggtgttttataattttacgattctttgaccaaattctaagctttctaattggatagatagtaactgaattagtagtaaattaaagaattgctgaattgaataaagtaatgcacgtagaaattcttggtatagtttttggactataataaaaccaattaacgtagacctgacttcaaggaaacttcattttatttttctttcttgaaagagagtatttatgtcactactaccactgacatccagccaatgcaagctagtagggctgccctggttgtgctcaacctgcatctactaggactagcagtgccaactagttgttaaatatttggaatttcacgcctgggtataaccagaaaggaaactattctttctgtatagggattctttatattgaaattttaataactttatttatttatttacctttgagacagagtctcactctgtcacccaggctggagtgcagtaggcaatctcggctcactgcaacctccgcctgctgggttcaagtgattctcctgcctcagcctcctgagtagctgggattacaggtgtgtgccaccacacccagctactttttttgtatatttagtagaggcgaggtttcaccatgtgagccaggatggtctcgatctcttgacctcgtgatccgcctgcctcagcctcccaaagtgctgggattacaggcgtgagccaccgtgcctggcctaataacttatttagagtgttacatattaaagtaaatattgacagaaaattataattagccactcttcaaacttatttctgaattatgttattcatttttgtttttcaaaatagttgtacattaaaatacagaagattctttctagcatggcagtccagccaaatacaatatcatgtaaaatgtgtttgctgtaacctcccacagtatattgttagccaatttgagtaatgctagaaatgatatgttcttgtcatttaatttataaatctgcaactgaatataatctataaaagatcacattagaatttgtcacagaaacaatgtaagagaagtttggtaaaatacccaataactctaaaaataagagggttagtgtaactcttaaagagcctttagtcagagtcatgcaaagtaaaaactaatgtagaacatgcttattaatataaagtttcttttttttttttttttgagacagggtctcactctgttgcccaggctggagtgcagtggcatgatcatagctcactgcagcctcaaacccctgaactcaggcaatcctcctgcctcagcctcttgagtaactgggactacaggcatgcaccaccacatcactcctagctaatttttaagttttttatagagatggggtcttgctcagttgcccaaactgcttttgactcctggcctcaagtgatcctcctgcctcagtctccccaaatgctagaattacagatgtgagctgctgtacccagcctcaagtttctattttatactttccctgacttgggaataaaataaatagtcagtattttagcctgggtttaaagtagcaggtgcctagttaggagttgggtgtatcaccctgtttgtttcagcaaattacttatttaaacattgagaacaaactctcaatgtgtttgaaagcagaaattgtaagctatctgcagataatttttgaagtataagtttcatatatcagcacttatacttagcataagtgagtgtataaaatatacatgaacataaaattctacagaaagctaatattttgacttgattatatttctaaagtagtcataccatttcattgggttgcccttaaatgaccgtgagagagaattctgaagcttgaagtctcttccttctatactaattcaaataccaaaatgagaagcaaatataattcagaggacttctggtcaagattatcttgttagttccaaatttgaagtctcatctcctcccctttgcttcaaaaacataacaataatagatgaatcataaaaagaaaacattttaaacacatagccaaatcccaaaatgagacagctatttcttgatggaacagaagcagaaaaagcagtcagaacagtgagcctgctgagctggaaggaggagaagtggttgggagctcagctactgtaggccagacactagtgccagattccctgctagaaattaggagctggaatagatgctttattgaaataaagagcctgaatgaatgtgctaataataacagttaaattatatgtctagggaggcaagagtacacagaaacagcctcaccatgggatcttgaaacaaactgatactggtatggtgataaacccggccagtactgtctttagtatgattgcagggcaggagcaccgaggcaccaattatgagacctggtttcagtctgagactctaggaagccaccacataacctatagatttggaagtattaagccatattagataagcttgcataacaaaatacatgcggaaattaacaatagaaagatagcagtcatgatcataattaaggtaaatttatccaaataaaattaaaaactaatagaataattttgaaaatactttgagtagcctcaaagataaatgaaggaacaatattcataaaaaagaataaataggaaataaaaacagaaataagtaagaacatgactgtgagagagaactagttaactagaaagcttaaaatgaaaaatatagtcattaaaattcaaagctcagtaagcaacagtgatctatactggacactatcaaagagagttaataaattggaagataataattagaaaagattatccaagttatctttatggaagagactaggttgtcaggtcaaaatgcactccgaatatactgagcaagatgaataaaaataagccaatacctagacttgtggttgtgatgctgaagaatataaagcagcggtccccagcctttttggcaccagggacccggttttgtggaagacagtttttccatggactggttggtggtttcaggatgattcaagtgcataacatttattgtgcactttgtttctattattattacattgtaatatataatgaaataattatacaactcactataatgtagaaacgaggggagcactgagcttgttaatctgtatttgcagctgctccccagcattagcatcacctcctcagttccacctcagatcatcaggcattagattcctgtaaggagtgtgcaacccagatccctcacacgtgcagttcacaagagggtttgcactcccattcagggagatggtcactaaggtagtaacagtgtatttctctgtatctttcaggtagtgagttttaaaaagaacaagtatacctgctgttggtgagaaaatggtagaaggccttcctacattgctagtttaagtgtattgtcatcaccgtaaacaatctgatggcatctattaactttacaaatacagccttttcagcaatccctctcctggaatctatcccagagacgtaaaagtacccatatataacacatctaccaggagacttatcagccttattcatagaaacaaggaaactagatatatattggatgtccatcagcagaatgttatgatatattttacatgttttacatatatatgctataaacctataatacatctctactatttttactttataagtcagctctcttttagaatgattaaaaataaaaatatctcgcttcccttgtggacatctacatttctgtctggcttcatatttcttctgcctgaagaaatacctttaatattttgtatagtgcaggtaataaattatctcaacttatttttatctgaaaaagtctttttttgaccttcatatttgaaagatatttttgctgtgtataggatacttggctgttatttcagtgctttaatgatgccactacatttaggttggactgcatcggttctcctaagtcagctgtgattcttatctttgtgcctctgtatttaatgtgtgtgggtttttttgttttgttttggttttagctgtcctcaagattttctctttgtcttggtctttaataatttgaatttgatggatctaagtacatgggttcttttggtttttgtttgggggtggagtgaccatgggtattttctgacgtgcttgaatctgtttgattttttttcattatttataggaaatgctcagtcattatctctttgaatatctcttttgtcccattctttctctcttttccttctgggagtcaattagatgtatattaatgcatttcttattattttacagcccttgttggattctctgtcttgttttcttactctttttttctctttgtagggttagtttgtgcaatttctgttaacctgccttcaagtttgcaattcattcccaagctctgtccagtctattattgaaacctatttaaggcattcttcactgcagtcaccacattttacaaaatttctagcattaccatttgtctctttcttatagtttttaactctgctgaaattcccaatcaattcaaacaaattttgtagatcacagttcttttatattccctctttgatattttcagaatgttttatctctgtgtcatattctgctgatgactttgttcaacatggattcttttacttacttttttgtgtgtttcatacatttcagttgaatgttagacattgtatttaagaaaacagaggcagaggctgggttcagtggctcacctataaaatcccagcactttgggaggcttagatgggagaattgcttgaatccaggaattcaaggctgcagtgagctagggttgcaccactgcactccagcctaggtgacagagtgagaccctgagtcaaaaaaaaattaagaaagacagaggtaaattgtatggaaataggcataccttttcatctcttaagcaggggaagtaaactttttctgtaaagagccagatagtcaatattttttattttgtaggccagatagtctctgaagtctactttacctgatactaatataagtcagtcctccatattttgagtgacacatgcacagattcaaccaacgcagattgaaagtacatacagttggcccttcatatcctcagattccacatccacagatttaaaaaatctgtggatggagtgagcaactgtagtatgccactttgtataagggacttgagcatctgcagatttttggtatttccgaggcagggggatgtcctggaaccaatcccttaaaggtatggtatactgtatagccactcctgctttcttttgacttacgtttgtgtaggtatctttttccatccttttactttcaacctaactatattagaagtttctcatagatagcatatagttgggtggtgtgcttttaatccactctgccaatcctcagattttaactattgtggactatttgcaattaatgtagttattaatgtgtaactaccattttactttctgtttttagttggtttccctttttcatttgcattttttctgccttcctgtatggaaatttttttagaatcccattttgatatatctctggttctttttttctttttcttttcttttttttctttttttttttttttttgagacaggatctggctctgtcactcaggctggaatgcagtggagcaatctcaactcactgcaacctccacctctcaggcttaagccatcctcccccctcagcctcccaagtagctgaggctacagatgtgtgccaccacgcctggctaatttttgtgtacatggggtttcgtcatgttgcccaggctggtctcgaactcctgagctcaagtgatctgcccaccttggcctcccaaagtgctgggattacaggcatgagccaccacagccagccttgatatatctatagtatttttttttcctcaggcagatttgctctagacattacattatatgtacatagcttatcgcagtctagtagtgttgatattttaccagttcaagtgagttgtagaaacctttgtccttttaaatcccttaaccacctttgttgataattgttttagatattcctttacatacattgagaaccacatcaatgttataatttttgcttcaactgtcaaatatattatggaaaactgaagaggagaggaaagtctgttgtatatacccatgtgcttgctctttccattgcccttttcttccaagaggtttgctgattgcttactttgagctttactgtttggcaactattttatgttcagattcccaaagactattcattatgaggaaacagtgacaaaatcatagtctgtttatctgaaatataaagactgaaatgacagtgtagagaaatgaagtcatcttctgaattaggcatttttcttggaatgggtacaaccctaccactactctacatcatggaagtcttaacgatttagggtaatacgataatgagaataccaatatggatctattaaatgaggagctgagtaagctccaaatttccctctagattggtaagtctataatttattatatgaaattcctaattattaccatactaagttcaaaagattttaacccaaatcctttagtaactgataaacctcattcttaagattcttgacagaaataatcttgatgagcttcttctcttcatgatctttccaatgctgttataattttgagggaattactcttattttcattaattctgttgcaaggaggaaaagactgactctgtgttggggtttcttttctctataaggcacaagacctaaatgtcattgaagaagtgattcgaatgatgttagagatcatcaactcctgcctgacaaattcccttcaccacaacccaaacttggtatacgccctgctttacaaacgcgatctctttgaacaatttcgaactcatccttcatttcaggatataatgcaaaatattgatctggtgagtgtaaatgaagacatttattatgattcttttttaagtattaaagcagagaatgtttaataagccttggtaagaactataatagtaagagtttcttctttcaacattaactgtatttgcagtctattttactataatagttgtggtaatctgtgtgtgtgttgtatatacacacacatacatatttaatacaattgaagtcatacttcatacagttttttattctgacttttttactttacacttagaccatgagcatttttctgtggtattatcaattctttgaaagtctcacattttaatttctatctagcccatgtttgtgtcctaaaatatatataactattatcccatttttgctcatttatttccagtattttatatcaattcataatgaatgaaaagtttataaataagtcttatctcaaattttaaaattatatttttgatatggttttaaagctggaattttactagtttttactgtcaaaagatatctttattttcaagattcaacacaggttgccaaattgctttccagaaaaactgtagaatttatgcctgtgggccgggtgtggtggctgatgcctataatcccagctacttgagaggctgaggcaggagaatcgcttgaacccaggaaatagaggttgcagtgagccgagatcacaccattgtactctggcctgagcaacgagagtaaaactccgtctcacacacaaaaaaaaaaaaaaaaaaaaaaaaggctgggcacagtggcttatgcctgtaatcccagcactttgggaggccgagatgggcagatcacgaggtcgggagatcgagaccatcctggctaacacagtgaaaccaaccccatctctgctaaagctactataatatatgttccatcaacacaaagtagtaaacaaagaaagacgaagacaaaggagccaggcttaaccaaaggagagcactgaaggcagttcccaagaatacactgtagtgtgtagaaccagtgcacagtgggtgtggcaggtagcaggtctccatagaaagagcagatttgagaatgttacttgatctgtttgactatttagagaggagttttagagttctgttaaaaagtttgtagctgtgttagagattggatatttgcaacatacaaccaagaaaagtctagaatctagaatataacaataaaatatatattaataatagataaataactcaatagaaaaactaacaagaatcgaacaggcactcccaaaagaggaactctaaatggctaataaagatatgaaacacataggatgtattaactgctggatactctggaatctacacaattaaatgtgagtttaacctacagttgagtatactgttgcaaatccattcattgattttcatggctttttcatgattgctggtaaacagaaattaatattaaaactcttctgtcagcttaatttcattggctttcgttaagctgcttcaactatatacctaacggttgcagctatagcaaaatattttgccatggacactcttgtcactttcctaaacttatatcgacatcatttaggtatcattaacagaatcggggaatttgggtatagttgccatcagtgcaatcaagataaagcagaaacaccatttcacacaaggatgtttattttaagaatcaaactttgacattttaagggaaatctttatgaaccaggactccatgtagcttcactgatatttaggatgtgtgtgagagcatccttagcaacttctcgattatttcatctctggccacatgtccttcttgttaactctgagttttaattaagaagtattggtgttaataagatctctttaaaattgagaagtgtcagtgttaataagattatgaaacaaagttttgcctaaggaacacctatcacgagttaactccgtcttcttttatgggatagattatttttgacaacatggtaaattgtggtttatagtctaagaattcctgttagttttatgctttgatagaagatgataatgcaaaagtaccagttattaaggaaagtaaagagtccatgggggctgaggggtatctcatgggagaatgccatccctgctgtcatctcagctctcaaagaaactatctggaactcaagcagggcctttatccattcctcttaacagttattcctgcaagcagtcttaaggattataacattcagtagaaatcgttctctgtatgaaggcaactttataggctagctgtttacttacttctgaaaagctttttctaaccatgttattcatgaatttgtccaaattcatttctatttcttcccagtagtatttttggaggtaaaatactgagtttaagactcattatgcttgtgggtaaaggtttcacaaaactctttccccttttacatgagaaattggccttgggttaagatgcttctagctcagttctctagaaatctaatggaggtagaatgtcagttgtgttaccaagcaacactgctatgataaaatgatgatgtgataaaatgacatttgattggtaagctgagtcattacttggaggactacgaatgaactacaaatacttgatgagaagccatcactttgggcttctccgaatgagagaattcttataactgggcatgtcctttacaaggacgtagaagctgagactgtcacaaggatattggtttctatttgagacatggtttctaaggtagggtggctattgcatctacctacagtagtctcattctcttgcatctgagctgtcatttgaagggtcaaagactagcccaaaaactgctataaggattcccaaggaaaacaaaaacctgtgagactatgctgttggcatgctgcttttcctatccttctatctttttaaaattaatctgatgcaaagtgtggccttttatagtcttgagactcttgatgtctaatatttcgtctaagaatatcacccaagaatgggcactgtaatattaaaatagtattttcttacatttgtttattaatgtatctctttcaagctccaggagatattcctggttttccaagatttattcagatctttacattctagaaatatccaacatgtccattttcagtcttcatgtttctaaactgtgtcatcccattcatttcagtctgcccttgtggcagtcctctatcccatctgttctaacttttacctttctctggacctccctcattccaatttcttttttcattccttcctatctttcttttttcctttaaaaaaatgtttaaagatagtcacctgaactatggactatgtatgtctgctaatatacacctgcagtaaatgggagagaaataatctctaattcccagtacctttcattgtgataggcaatattttctttgtattcctgacaaaagactaaaccagagatttttttttttccctgtggtcatagctgcagtagctgcaatattacacatcatttggagtatttagctttaacattttatttaaaccacatcaaaagccatttgcttcttttctaatcatcactagcttttattgcatacttgctaagcacttacgtgcaataacttacttaatcctcattaaaaaataaaccatgaggtatatttcattttagccctcaatttacagataaagaaaccaagttagaaagattaattaacttgtttactgtcacacattcagcaagtgatacagcgagaacttaaacccagagtttgatgataaggcctttgtttgtaataattctgcctaaccactatacacattcactaaatgctcccacagttgcctatgaaaccatctgatcatatccacaaacctaattactttctctttcaaaatcagttctaataatgtcaaatcagtctttattccatcagtggtgcaatgaggaacgttcttagtaaccaggcaattgatatccttaaaaatgtctctgagagccaggcgtggtggtacactgttatcccagctgctcaggagactgagtcaggagaatctcttgagcccagaaattcaagaccatctcttaaacacacacacacacacacacgaaagaaaaagaaaaaaaaagtctctgaaagaccatattaattttttttaatcaggacacacagaaccatgcaaagaatttaaactacatccatttgaaacacattctcctttggaagaagtgaaaagcagagtggaggtgaggaagtagaaaggacctcactgtaagtacacagtatagaaccatatagaagtaaaagcaggatgttaagttggacttatacccagtgctcacttttctgtcattgtcggaataatgggccacttatttacacttcacctgtatgcagtgaaaactgcattctcaggctaaacatttgactatatgctgttatgcagttcttaaaaccacataaacaaatgcctaaacatttttaagtacaccttctaaatgatgggaatgaagcttgagtgcctcatgtatatgacctcttttaccattcttaatccatgtgagctaggattattatcccactttacagataagaaaataaagatgctgagaggtttctcagatgctattaatatacattcctgcctaaggatcattgtcttggatagttatcacatgttattgcagggggctttatgtcattggccctttcgccatccctaggaggaagggagagcagggctagagaagggaaatagtaggcttgagatcacttagctagcaagtcagtcaaccaggccctgaatccaggttctcattctattaaatcccgtgttttcagcattcacttggataaacctaattaagattccaaatgagcaggttttccaacaactttttgttgaatactatcatccaaaatagtgctgggcacactggaaattcatttaaaaaacattttaaactccttttacatattttgaaaagatgctgtgataaagatataaataacatctctactgtgtgcctttttcagtactttaccttccccatctatcccccaaagatccctgaaattttggcttaaacaagcttttgctactttcttctttcatagagttaaccttcagaagttaactctgtgaaagactgtagaagaaaaaagttggtggaggagacgaatctactgttatttttagtgggcagggagttgagagttgattatttttggttaagacatttagcagcactcagtatctcagaagacagaagtggctaaccttggagcacttttaacgtctgcagaaggaattagatagatgtttttcaagtgcctacatttttattacacactggtgcctatctcgcccatctaaaacataaggtgatatgatcaggctgaattaagcagcaagacaaggtagaatatgacaccaaacaagagagaacataaaataaattgtctggttacctaagaaatggctgaatatgagtagaggacagatgcaatgaactataaccattgtatagtaaggtacaggcaagaaatcttgttatctctggacattagatcttgtgtatttccagacctgaccatccttatcaagctctaaactagcactttaggctactgacttgacagtcccacaattgttaaacaaggttaaatcataattcttgattttctgcaaaaaccaatgcaatataaaatattttcttctatagtctttcttatcccaatatatgacatcaatatctacccagttgcttaaggaaaaaaaaaagagtaagaaaggagaataatgagagctcgttagaataccggtaggagattgcagatttaaagaatgtaatcaggtgcgtttgagccaaaacttgaagcaggtagagagtgagctatgcagctatctggggacagagcactctaggcacagagaatagtgggtgggacggagttatggggaactggctgggaaggtggagtgaacattctgtgataatgaggggcagatggttacagggtatgcatatttgtcaaaactggttgaactgtaccattaaaatgagtatgtttattttattgtatgaaattgtacctcagtaaatttactactaaaaaataaattccctacagtggacttctgcttaggatatagaaagctaggaagagttctaccctaacaaagagaaaaagaggtaaactacaaaatcataacttttcttgaacctatcaatgagctgaggtcacaggacaaccaaatagtctagatcccaaggaggggtcatcggcccacccacccctcaagttgaggtgagacaccaggactggatcacctgtggcagagcacaggggtaggtagccaccatacaagtgggtaaaaagaaatcagatgcaattttaataacttgctaaaggttgagtgtggagtagcatgacattacagaacacccaggagacccaagcaccagaggaatttgcactcacaggctgttttccactgagactgggggcacagcaggaagccagagagcctcccaaggtgatgtaccaatagaaaaatgcgtagcatcattcccctgccagacctttctttcatatggtgcaaaagccttagattgctggcaggggtgggggtgcggaggggaggggggtgcggagaggaggcgggtgcagaggcaggcaccaaaccttgttgccctcggggcataggtagagacccattattgcacgtaaaagataaaacaaaaaaactctctacttctgggtaaagggcaggaaactgtcgcagccccagggttctataagagtaccattagaggtatcctaccaacaactcatcacagatacagggcaaagtctggctgccatcggaagaaagggaagagaaagctaagaaagccttatgccctaggcccaggcatagagagccccatttaagactgaggtcttaggacagcacgtagagaatcccctaccttctgccaccagcctagcaagtactgagtaacaagcagcagcatctgctgctgggaaagatcaagggcatggatacacaccctgctctgggacccaggtatgcagaactcactgaaagcagaacgtggagcatgaacgttgaaaaacctgtggcacttcagatcccagcaaagcacaaggcatcattagaggatgtggtacactgaaggtagccacagcaacagcaaaactcaaatttagctcaccttctgagtgaatcagctcaacctccaagcctgacctaagaagagatgtgccctaatttatcataaatagtatttctgtcagtctctacagttctacacatgatgtctaacattcagccaagcattatgagacataaaaaggcaagaaaaatgtaatggtggcaacagacccagactcagtgatgactcagatgttggaactgtcaggctgggactgtaattatgatttatcagtttcaaagatctggtgtgaaggtcaactaagtgggacccatcaggcaaatgcagcccacagcttgcctttgtacagcctgtgaaatacgtatgttttttacatttttaaagggttgtttaaaaaaaaaaaagaagaatatgttacagaaactatattgggacccacaaaacttaaaatatttactacctggttctttatagaagacatataccaacctttgtcctgggggaaaaggtgacaacatatataaacagttccagagagagatgggaactgtaagaaaaaataaaatgggaatgctagaagtaaaaaacatgtgacagacaaagaattgctatgactggctcattagtgggcttgtgaaaaaaatctgtgatcttgaagataggtcagtagaaattatgcaaataaatacaataagaaaaacatgtgaaaaatgagaacctatcatccaagagctataggacgatatcagatgattcaatatacatataattggagtctcacaaggagaagagagaaagaacaggtcagaagaaatatttaaagagataatagctgagaattttccaaaaatactgacatcaaaccacagatccaggaagcccagagaaccccaatcaggataaatccatttttttaaaagacattatatttaaacatctgaaaatcaaagataaaagaaaaaacacagtcttgaattcagccagagaaaaaagaaacattatatacagaggaacaaagatagtaacagcagtttacttggcagaacctagctaggcaagtcagataatgaagtgacatctttataaggctaaaatgaaaaaaaaacaaaatcttaccctcaaaaatgtctttaaaaactgaatacaaaataatgacatttcaaacaaaactgagagaacttattgctagtgtgtactatagactagttaatggaagttattcaaacagaagaactatcatatctgatagaaacttggatctacaaaaagaaattaagagctccaaaaatagcaaaaataaaggtaaacataaaaagctttttcttatgttgattcactgtataaaataattgactgttggaagaagaggtcctcaaactttttctgtaagtgagcagattgtaaatattttagtcttcacaggccacatagtccctatcacaattattctactcaacaattgtaattcaatggcagccatagactatgtgtaaacaagtgggtatggctatgttccaataaaactttatttacaaaaacagacaacaggccagatttggcccacaggctataggttgccaacccattttgtctaaaataaagatagtaacaatgtattgtggggtttataacatataaaagtaagatgtgtgtcagcagtagcacaaaggatgagagggaagaattggaagttgacacatgtgtgttgggagataattttccacagatttcatcttgtgagcaaaggcactgactgtcctttgctctagattatcttttcaaagatatttgtatctccttctggagtaaaagataggcatggttactgaccactctaagagattcgggttccctaagctcagggttctgtcctttaacataatttactgcatgtgcaggtgttgtctgacccttgtcacataaccctaagcaaactggggcttggggagccagtgtggtaatgcagatgctctgatcactgctattgctgtgactaacaaacttccctccgtctctgacccagaaatatctcttcttccaggatccatgaactatagactggataacttgttaactcacaagtagggtaccatatcacttttcacagttcttcacagtgtcaagtagtataatattatttgaagatagactgtgataattaaaggtgtatagtataaactctagggcaaccactaaagaaaacattaaaatagaaatataagtagtaagtaaaagatgaagataaaatagaaatcataaaattatacccagtccaaaggcaggcaggaaaagcagaataaataatagtggaacaacaacaacaaaatagtggaacaacaacaacaaaaatccatccatgtatttaaatcctacatgccaataattaaatcaaatgcaaataatcctgatgcctcaattaaaagacagaaattttcagattggataaaaagcaagacctaactatgtgctgtctataagaaacccaccttaaacataaagaaatagattggttaaaagcaaaaggataaaataacttttactacgtaagcattaataaaaaaaaaaaggggtaggatgactatattaatagcagacaaagtagacttcaacacagggagcattaccagggataaagagggactccatgtaatgataaagaagtcaattcaccaaggagacgtaacaaccataaatgtgtatacaacagagcttcgaaatgcatgaaataaaaactgatagaatggcaagaagacacaaacaaacccataattggagaagtcaacacttctttctcagtaattgatacagcaaataaacagaaaatttgtgatgatacagaagacccaaacaatactaaccaccaacttgatgagttcacatttatagaacataccacccaacaacatcagtgcacgtgaaccattctctaagagagaccatgtatggggccgtaaaacaaacctcagcaaatttaaatgagatgagatcacctagagtatattctttgaccacagtgaaattaaactattgaatagaaatcagtaagaagagccaagatggccgaataggaacagctccagtctacagctcccagtgtgagcgatgcagaagacgggtgatttctgcatttccaactgagataccgggttcatctcattggggagtgccggaaagtgggtgtaggacagtaggtgcagcgcactgcgcgtgagccgaagcagggcgaggcattgcctcacccgggaagcacaaggggtcagtgaattccctttcctagtcaaagaaaggggtgacagacggcacctggaaaatcgggtcactcccaccctaatactgtgcttttccaacggtcttagcaaatggcacaccaggagattatatcccgtgcctggctcggagggtcctacacccatggagcctcgctcattgctagcacagtagtctgagatcaaactgcaaggtggcagtgaggctgggggaggggcatccgccattgccaaggcttgagtaggtaaacaaagtggccaggaagctcgaactgggtggagcccaccacagctcaaggaggcctgcctgcctctgtagactccacgtcttggggcagggcattgccaaacaaaaggcagcagaatcctctgcagacttaaatgtccctgtctgacagctttgaagagagtagtggttctcccagcatgcagctggagatctgagaatggacagactgccttctcaagtgggtccctgacccctgagtagcctaactgggaggcaccccccagtaggggcagactgacacttcacacggccgggtactcgtctcagacaaaacttctagaggaacaatcaggcagcaacatttgctgctcaccaatatccgctgttctgtagcctccgctgctgatacccaggcaaacagcgtctggagtggacctccagcaaactccaacagacctgcagctgagggtcctgactgttagaaggaaaactaacaaacagaaaggacatccacaccaaaaccccatctgtacatgaccatcatcaaagaccaaaggtagataaaatcacaaagatggggaaaaaacagagcagaaaacctggaaactctaaaaatcagagtgcctctcctcctccaaaggaacgcagctcctcaccagcaacggaacaaagctggacggagaatgactttgaagagttgagagaagaaggcttcagatgatcaaattactcctagctaaaggaggaagtttgaacccatggcaaagaagttaaaaatcgtgaaaaaaaattagacgaatggctaactagaataaccaatgcacagaagtccttaaaggacctaatggagctgaaaaccaaggaacgagaactacgtgacgaatgcacaagcctcagtagccacttcgatcaactggaagaaagagtatcagtgatggaagatcaaatgaatgaaatgaagcgagaagagaagtttagagaaaaaagaataaaaagaaatgaacaaagcctccaagaaatatgggactatgtgaaaagaccgaatctacgtctgattggtgtacctgaaagtgacggggagaatggaaccaagttggaaaacattctgcaggatattatccaggagaacttccccaatctagcaaggcaggccaacattcaaattcaggaaatacagagaacgccacaaagatactcctcgagaagagcaactccaagacacgtaattgtcagattcactaaagttgcaatgaaggaaaaaatgttaagggcagccagagacaaaggtcgggttacccacaaagggaagcccatcagactaacagctgatctctcggcagaaactctccaagccagaagagagtgggggccaatattcaacattcttaaagaaaagaattttcaacccagaatttcatatccagccaaactaagcttcgtaagtgaaggagaaataaaatcctttacagacaagcaaatgctgagagattttctcaccaccaggcctgccctaaaagagctcctgaaggaagcactaaacatagaaaggaacaaccggtaccagccactgcaaaaacttgccaaattgtaaagaccattgaggctgggaagaaactgcatcgactaacaagcaaaataaccaactaacatcataatgacaggatcaaattcacacataacaatattaaccttaaatgtaaatgggctaaatgctccaattaaaagacacagactggcaaattggataaagagtcaagacccatcagtgtgctgtgttcaggaaacccatctcacgtgcagagacacaaataggctcagaataaagggatggaggaagatctaccaagcaaatggaaaacaaaaggcaggggttgcaatcctagtctctgataaaacagactttaaaccaacaaaggtcaaaagagagaaagaaggccattacataatggtaaagggttcaattcaacaagaagagctaactatcctaaatatatatgcacccaatacaggagcacccagattcataaagcaagtccttagagacctacaaagagacttagactcccacacaataataatgggagactctaacaccccactgtcaacattagacagatcaacaagacagaaagttaacaaggatatccaggaattgagctcagctcttaaccaagcagacctaattgacatctacagaactctccaccccaaatcagcagaatatacattcttctcagcaccacaccacacttattccaaaattgaccacttacttggaagtaaagctctcctcagcaaatgtaaaagaacagaaattataacaaactgtctctcagaccacagtgcagtcaaactagaactcaggattaagaaactcactcaaaaccgctcaactacatggaaactgaacaacctgctcctgaataactactggatacataacgaaatgaaggcagaaataaagatattctttgaaaccaaagagaacaaagacacaacataccagaatctctgggacacattcaaagcagtgtgtagagggaaatttatggcactaaatgcccacaagagaaagcaggacagatctaaaattgacaccctaacatcacaattaaaagaactagagaagcaagagcaaacacattcaaaagctagcagaaggcaagaaataactaagagcagagcagaactgaaggagatagagacacaaaaaacccttcaaaaaatcaatgaatccaggagctggttttttgaaaagatcaacaaaattgatagactgctagcaagactaataaagaagaaaagagacaagaatcaaatagacgcaataaaaaatgataagggagatattaccaccgatcccacagaaatacaaactgccatcagagaatgctataagcacctctacgcaaataaactagaaaatctagaagaaatggataaattcctggacacacaccctcccaagactaaaccaggaagaagttgaatctctgaatagaccaataacaggctctgaaattgaggcaataattaatagcttaccaaccaaaaaaagtccaggaccagatggattcacagctgaattctaccagaggtacaaagaggagctggtactattccttctgaaactattccaatcaatagaaaaagagggaatcctccctaactcattttatgaggccagcatcatcctgataccaaagcctggcggagacacaacaaaaaaagagaattttagaccaatatccctgatgaacattggtgcaaaaatcctaataaaatactggcaaaccaaatccagcagcacatcaaaaagcttatccaccatgatcaagtgggcttcatccctaggatgcaaggctggttcaacataccaaatcaataaacataatccagcatataaacagaaccaatgacaaaaaccatatgattatctcaatagatgcataaaaggcctttgacaaaattcaacaacacttcatgctaaaaactcaataaattcagtattgatgggacgtatctcaaaataataagagctatctatgaaagacccacagccagtatcatactgaatgggcaaaaactggaagcattccctttgaaaactggcacacgacagggatgccttctctcaccactcctattcaacatagtattggaagttcaggccagggcaatcaggcaggggaaggaaataaaggatattcaattaggaaaagaggaagtcaaattgtccctttttgcagatgacatgattgtatatctagaaaaccccgtcatctcagcccaaaatctcctcaagctgataggcaacttcagcaaagtctcaggttacaaaatcaatgtgcaaaaatcacaagcattcttatacaccaataacagacaaacagagagccaaatcatgagtgaactcccattcacaattgcttcaaagagaataaaatacctaggaatccaacttacaagggatgtgaaggatctcttcaaggagaactacaaaccactgcttaatgaaataaaagaggatacaaacaaatggaagaacattccatgctcatgggtaggaagaatcaatatcgtgataatggccatactgcccaaggtaatttagagattcaatgccatccccatcaagctaccaatgaccttcttcacagaattggaaaaaactactttaaagttcatatggaaccaaaaaagagcccgcatcgccaagtcaatcctaagccaaaagaacaaagctggaggcatcacgctacctgacttcaaactatactacaaggctacagtaaccaaaacagcatggtactggtaccaaaacagagacatagaccaatggaacagaacagagccctcagaaataacgccgcatatctacaaccatctgatctttgacaaacctgacaaaaacaagaaatggggaaaggattccctatttaataaatggtgctgggaaactggctagccatatgtagaaagctgaaactggatcccttccttacaccttatacaaaaattaattcaagatggattaaagacttacatgttagacctaaaaccataaaaaccctagaagaaaacctaggcaataccattcaggacatagacataggcaaggacttcatgtctaaaacaccaaaagcaatggcaacaaaagctaaaattgacaaatgggatgtaattaaactaaagagcttctgcacagcaaaagaaactaccatcagagtgaacaggcaacctacagaatgggagaaaatttttgccatctacccatctgacaaggggctaatatccagaatctacaatgaactcaaacaaatttacaagaaaaaaacaaccccaccaaaaagtgagtgaaggatatgaacagacacttctcaaaagaagacatttatgcagccaaaagacacatgaaaaaatgctcatcatcactggccatcagagaaatgcaaatcaaaaccacaatgagataccatctcacaccagttagaatggcaatcattaaaaagtcaggaaacaacaggtgctggggagggtgtggagaaataggaacactcttacactgttggtgggactgtaaactagttcaaccattgtggaagtcagtgtggcgattcctcaaggatctagaactagaaataccatttgacccagcaatcccattactggatatatacccaaaggattataaatgatgctgctataaagacacatgcacacgtgtgtttattgcagcactattcacaatagcaaagacttggaaccaagccaaatgtccatcaatgatagactggattaagaaaatgtggcacatatacaccatggaatactatgcagccataaaaaaggatgagttcatgtcctttgtagggacatggatgaagctggaaaccatcattttcagcaaactatcgcaaggacaataaaaccaaacaccacaagttctcactcaggtgggaattgaacaatgagaacacatggacacaggaaggggaacgtcacacactggggcctgttgtggggttgggggagaggggacggatagcatttggagatatacctaatgttaaatgacgagttagtgggtgcagcacacaaacatggcacatgtatacatatgtaactaacctgcacattgtgcacgtgtaccctaaaactgaaagtattaaaaaaaagaaataagatatctggaaaatctccaaatacttggaaattgaacaatacacccatgtgtcaaaaagaagtttacaagggaaatagaacaaatttaaggtgaacataaatgaaactgtaacatgtcaaaatttgtgggacccagcaaaagcccagagagaaatttacagccttaaataagttaatgtctgcacagcgcaaagtgctttgcgcatggtaagtgctcacagagcgttagctcttactgttattaggtgtgtatcagtaccctcatttacaaaatgacaaagttgccacattatcattattggttcctatgcagtagatgctgcaactttgtcactttgaagatattataagaagaggtgggatttaaacccaagcagtccgacaccaggtaagttctctaaaccactgcatcatgctacatctagatgttgagtgttttacaagtcacattgctagtatcagaggcaagactcaaatgtaagccttctttgagtagttcattatccactttaccatgatgtctattctaattatacaggtttgatctgtcttatctcacaaattacactgtgtctttcttcaagagagaaaatggtatcatctatttatttccctggtaaatcctcgggagagctcctctgctgaatggattgtcaatatatgtattgattaaaatacagtaacttgaggggaaactcaagtcaatgaggaaatatatatgtattttacatgtttatcgttgtcttaaaaaataaaaataaaataaaataaaacttagctgtctacttctacctcttaggagagtggccatttttagcaagcaagcattttgcctgaggagcacatactagctcctttttattctcctctactccagaaaagcttctcatttctattaatctgtgatctattaataataatcattcacttgtttcatgacaggtggttaaatgtgatttgacattactcaaagtaaacaactgattaatcagtatatgacagtgggcaatcactgttcaaagctaatagcataatggaaggtaatatgctgtacttggatttcatgagttacagccaaatattgtaggtagaggagggttgtaaaacatgcgctttggaaaagtaccttcctttgaaaggttgtctttgaattacactgacaaagcattcatccccactttcactaaaggttttacttgaatgttttctgttattggctgtgtctcatgcagagattttcagaggaataaaagttcatctattttaatagttttaatggttgctatacaaatggataaaagccacacatctgttgtagtcatcatcactaaaagtactattatatgcaaaattataacctgggagtaggaaatagaagctcttatctttgaatgaattgtttcacgttctttgctggtgttgcagtcagacaacatctgaaaggtttggctgaacaacttacacctttcacttagatatctcctatttgaaaaactaagctaatgctccattttgctacataggaattgccggagacatgataaagtaggaagaaatacctgagctggagtcctactcctcccacttgcctgggccaccccagtctagtttgtctctgatcctttttacaattctgtaggacagagatttttatcagcctcatgggattgtcatgagaattaaacaaatagtatatgtacagcacacagtccatgataaacattcaggatagatttgtttccttcggttttgacacataaattatacttcccttctgcaagtggttgttttatcattttctaaaatcatgtgagtttgaatgcaaaaacatgagaatgtcagctttaaaacatacaaatgagaaccagtttgaaaaaggaatttagttggaaacccagcttcatgcctcctctgcagctctcccagtggaaatggaaattccttgtggcttagaggaaagccagtataggccgcagagtcaacaaagcaaaactgtcattgcattactttgttcttggtggtgtgacacataagtacactcccttttgttggtttgtcgtgtctttgagtagtaagtgaatactgtgagttccctttaactctgattatgtgccttttgttatctcgattagtgattatcaaagcggatggctccacatgccccagagattgcactaacagttcatccgtagaagcatggaaagaaaatattagagctgttatttattcatctaaaaataaggagatttagttttactaatagtattggcctttacaaccttccagggtctgtgtcagcctcagtactccagatatcccgagggaggagataggagttcctcaacttgtagggcttggcatacatgcgctcacctgttcattcacgtaaagcttagtgtagtatatgtgttcctggttacagtatctagatttagttaaaccctcacgaaatagcgtgtttccccacacactgaaggtgatagaaaaatataagcacatatgacaaaagataatggcagagctggcatccccctcctcctggaacaagtgccacattacaagggaaaaacagtgatgaaccagtctaatctcacagaaaatggatccataaaagttatcaggaagacttttaggcactatggatttaatattcactgtaataaacgatgcatcttaccgtgggtgaatactgtgcttgctgatggtcatgtgaaattgctgtgattagtaatctgtaattacccagattattttcaatgacattttaatgagtacaaaaaacatgttttgtatcattggtttttttaatctaattgattttatctttatctcattcttttaaatttattttatgaacattttataatatgtaaaacatcagtgctgtagtatattgcatgatttataaagaactagaacatatattgcaagcacatcctcatttttttacttgtagatgtgtacaacttgaaaagtttggaaacctctggtctggattctgactgatcatcaaaatcacctggagagcctgatgtataatagaaggtccctgactaggccctgggatcagaatttcacaaggcttctcagctacttctgatgatcagccatgcttgagaactactccttgtctgtatgatctactgctataaacaaaacaaaaatccagtagtgaaatatcagctttcagcatgttagaaagaaaaaaaaaattcagtaagcctaaagcatatgtaacatctatctactttttaattaccatttttttattttttagaatgtgtttttaacagatatgctcctactttttaaatattttttggtcaaagaagataatatgcataggtgttagattgacccatatgaaatttctaacattaaaccatttttttaccaacaaaattggcatttcatatggttaaccaattcttttctcagaaaaactatgctcagtttacaacctgtgaagatatttacacaaaaggaaagcatttattttgtgtattcattgttgcatattttaaaaataggattttaatctattacaatatgttttgctatctgtgttgtgtcttttttcagatatttattcactatattataaaaatcaatttttggacctgctgtgtctaaactctgtgaacaaaatattaatcccagaaactcaaaaagaacttaaaatccgacatggggaagaacaaggcccacaggcacgtagcgaaaagcccacttgtggacaaaataagcagcttgcaaagtagctggtggtgccagcaaactgcttgagaaagaaatggtttatctggaatcacaagcagtgtcaccagccatgagctgcctttgttctcactcattgccacagaattgtgaggcacatgcttgttaatggctgtggcgccagctaagtctctttaccttccagaacaaatgcatttagtggcatttatgtaatatagtgtactttccactagaatggataagacaaaagttattgtactcttaaacaattagcatttaggagagtaattctgaaagaaaatgcataaaaacgtttgtgaaggattgtttgtaacttaatatattttacctataaaatagaagacataaaaggtaatgctcaactttacaaaaacacaataattttttatatttttgcatgtctgactataaacacctaaatgttattctcttgaatttaaaagggatctgcagtcttcttgatttatgaacattgtggttttaaaaataatttgctgaaaaatgatgttttgttttcattttttagtgacaaatatttagggaccgtgtatttccagaatgctactgtgttaatatcttgctgcatactttgggctgtgctataacatgaagcaaaagtaattataggttgctatttgttatccctggtgatcatgataagggaaatgtggctaaattcatagataatccccaaaacatcattttagccattagtttcaaattctttcctgttaagcccttttgagagagagagagagagagagagagagagagagagagagctaatattaagcttcaaaagtgataggctttagggtttagctttctctcccgactttctgttggatactgctctataaacgaaatataaatgcaaggtcaggcagcacaagaaagagtagaattcaggaggctacttaattcacagaatgaataatcagccctggatattgaggggttgcctctgattcggctatcaaacccaacggagagcaaactgcgtttaggagggctagtgaattaaaagccgggtcactgtaggaatggaatcatgatagtttgactaccatgtgagaaaggcggctactaaaaatacatttcatacctcttcttgtttaaaaaataacactttacattacaggtgatctccttctttagctcaaggttgctgcaagctggagctgagctgtcagtggaacgggtcctggaaatcattaagcaaggcgtcgttgcgctgcccaaagacagactgaaggtaagaaggctaaagaaatgtccacttgacactgccgtgtcccttgatgtaaatgttagtgtcttagcagaccctatccagaatcatgctgcttatccagtacatagactagaagggctcctcagaactgtgacaaaggtttctgacagcttttcaaaagaagcattaatactttcatgccactgcatatcctacaagtagccatggcatgcactataattcatatactgttaataaaaggacaccttatttttttaacccagtgaaacaaattcggccttaagagtatcatcaagagttaatgggaaggtgatgatgaagatgatcacaagagtagctaatatttccatagtgtgactcagtgccacacaggttctaaatgtgttatatcaagctcattcagtccctaccacagccctttgcggtgggtagtggtatcatcctaatttttcagatgaggaaactgatgtacagtgaggttaagaaacttagccaaagccatacaactggaaaatgatggagcctgcagattgaaacccaggaagtctatctccagtgcccacattcataattgctgcactgtttactgtgtgcctgggatgtaatagtggaaagagatgcacttcgtggagaaggtgggggaagtgctgtatttgaagaaggcatttacatctgtttgatagatgtattcctgaagcagtctcacaatataaaactcatacttcaagactaattatcccataagaaaaagatgtaaagaagatcctttggggaatgcatgaatgtacagcattgcagcttacttttactttactgttctttttagttttttcttcattagctctaattttttagagtgctttcacctaaattaccaacacaggaggtcatagtggatatttggccttcatagtgttttgtcacagttcacgtctgttccagtgttgttactgtttttgggggctatgtttttcagcactatcactagaaccactgcttaatgaatgcttgagagatattgttgtaggatataaaaatattttcaattataataacagagtttgtaaaataacagcacattagtcatcataatcatttactgaagttccactgtacataaacaacagggagattcacacggtactgtgcaaagatggcaaatgttctgtttatcagccaaagtggcaccaccatgtggtaatagcataaaaacaggttagagttcactgggccctccagcttggatgtgttcctattccagataatttttttaaatatagagaattcatattgtttccatttttacataaagtaagaccttggtttgttggttggtttgggggtatttttgtgggatttttttgaactatttcaaatttatgtaaactataccatgtgaaccagtacaaaaaaatctatgaagattaaagtggctactcccaggaagtgatggatcttggtgtgtaagctcagtcaagaacaaagtagaaatatcgaggctgccaaaaaaggacactgcaatggagtctggggaaggttaatcttgtagttcactgtaatacttaccttaaagcaaaatgaattacagtgtgcaggctaagtgctggaatgttaatatttgttcatttattatactatattcaaaaataaaatgtcatttatatttgagacagtgacatataaacaaaaatgtaactcttttcgtttttcagaattatggctaaatagagaaaataattgatctatggtgggtcccaggcaagttgactctgatttagagcaagatcctattgaggccaaggtcatgggtaaatttcttaagagggccagttaatttggttctggaacatagcaagaagttgtactcctgacctcagcttgccaactcacttcatggttgcaaaaggatagaagatggatgattcagtttaaaaacaaaacaaaaaaaaaaaaacactatcaccagtactagaaaagattacatttactaaaattacatttacccacagatggtgagtcatcctagttggtttaaatgatagcatattattaccacagatgttactagaaataaaaggctgtttatccttacaatcaagccttatctcaattattttaatcatctttttggattgagtgtttataataaaatgagtcacttaaaatctctagagtttaattcacagaataccacggtatctaaagttgattcaaaattcaagctgtgttgagtaatgtttacatgatactacatgacagcacattatagtctttggagtagtttactaatatatactgataaaataattgtcgggtgtgtaataatagtttcatacatgatattgatgtaaaagagttggtttcaaattggaaatgctgtcttaataagccctctatgaaaatgtggaataatatatactaattgatttgttgtttcttaaaatatataaattaaacacttagaaactcagaattctttactactaccttctgggttgttaagaggatcacagcgccccttactcatgaaaaattcaccagctaatgtcagctgaagccgatgagccaaaagttttagaactttcccttgcattgtagaattgaagccaactttgtagaagtagtattcttccaattttgggcaagtaaacagtaagatctggaagcccatggaagagtaattgacttccaaccaaataaaatatttttcaatcaaatattatttgacatagccttctaaaatatttgtgtaatatcctatgtgggaatgcatactatttggataaatctgtctatatagttaaacaacttggctgttcagagtaaatagtattaatatcattctaaacattctcttcttactggtattctgtgaagtctgggaaaggcaataccaggtaattattttttccggagcctcctgcttaaacagagacctaaagaacaggctctgaaatcctgagtcacttatttctcctttaggatttggaaggaaataaataaagttagtatgtcctctgggagccgacttagaagccgcagctcaaagctctcactgtctgtatccacaacagggcatgttcctggctcgcattttgcttactgtggagcaatttgaatgtcatggtgatgggtcagaattcttccagatccgtgcgtgttctcataccactaccacctcagattttattatgttgggctctcaagtcccctcttttcttcagtttagtgaattatctatgtcatttgaggattaagaattttactgtatttagtgtttgaaaactaggtagtgcttttcaaggggaattaaccagaagataacttatcttttagtgtaaataagaaagtgtggaataatatgttattgacattaaccaaacttcatttactcaagacacttgataagtcataggaattaaaagtaattaccagtttcacactaaatgatttttaaagcctttattttatatccactttttagaatactttcatggttgtttttagttgcataaagaaaaatataaaaaatcatatcaactaacttgcttaaaacctttccctttgctcctattcaggggtctcttccctatctcaccctaagcatctttcgtttctttgtcagttctctatccccagagcagattcctgagtgctgtactgggagggccccttggggtcccacaggaacaacccccatgtgtccacagtcactctcttctgcctccccacacatccacactcctcgtgtatctctacctgtggaaatatgaatagccagcatcctccctctaactcaaaagtactgttagatcccaaaccctagaaattctcatttctcaagtcattcctttccctccacgttgccgccctcccatgtggctgctccacatttctcccacagtctattgctataaactcctaattggggtctccacttccacatccttcttcctccccaggtgttcttagccctgttgccacccttacaccctgctctgatccagcacacaaggcacttcatggcctaactcctgacttaagttgtgttctttttcctcctacggatcctgtgctccaacgctgtcagccgctggccgatcgtcaggtggacagagtccttgcatgccaggcctttgtgtatgcagcttctgggttctcacagtttcatggcttgtctgtcaggtgagccgatcatgctccccgctttctatgaagcccactctgattcacccacgcacactcggtggttttctccacattcctatggcacacgtatgtccctccattatagcaaaaccatcccccagcacacccatctcattcaatacatattcgtggggtaaattaacttcaccctgcctctggattcctatttctctccttcttctcagccaaaatcttgatttctcctttggtccttcaactctccttattcactgcacagcattagtgcagaacattaaaggagggactcccagtgaggagtgaggcttttctccatggcttgctgtcccaaggacctctcagcccaggctctctggtggaagactaagggtctcttaccgctaagctttccctgctagttggttttcctgtatttggcccttctccttctaccacccttctccttctgtccccagatttgcttctcaggatgtatgcacccacctgtccctttacattaatttgcatcatcatcatcatcaccgatatcacctataatatacaagcaaagcatctcttacaaatgtggtttgtttcttcctactgcagctcgttattttacccccactttgaccacaacattgctaggacgttggggaaacagaagtgtgtaagacaccacctctgccctcagaaaaatgtatcatctttcaggagagaaaggcacccccttgcgttgcagagctgagtagagcagggcactttacgctgcgtgtaaaatgaatggtgtagaagttaagttctggaagaaggagtggagacactgctgggaagaactagtcagggaacactgaagagaaacctggacttgaccttctctgtcttaaagggatggtaaggtttccataaagctgggatgaaagagaaatccagatggggaaatctgtgtgtgagtacaagagaaggcccaaggcaagttcagcttagtgtccaactggaacaataggactcccctatttctctctgctgtattaatgtggcttgtattatttaatggtacagtaaagtaattagtggctttcaaactctttagactgccacccacagcaaaaaatacattttacatcatgatacaattcacacatttatatacaactgaaatgaaagtttgataaaacagtacttaccatcattaaatgtgatgggctccgatattgcctattctgttttctttttttaaaattgctagtcagacccattaaattgatttaatgatccagtattatttagtaactcagagagttttaaaaataatgtgtcaaggctgggcgcagtggctcacacctgtaatcccagcactttgggagctggaggcgggcagatcacgaggacaggagtttgagaccagcctgaccaatgtgatgaaaccgagatcatgccactgcactccagcctaggggacagagcgagactccatctcaaaataaataaataaataaataaatattaaatcactgtttttcaaagtgtgatcctcatagcatcatcagcatcccctaggaacttgctagaaatggaggttctcaggccctaccccagacccatggaattagaatctatggggctggggcagtcagcgctttaacatcagccgctgtgtgaactgatgcctgctccagtttgagaagcacagtactaggtaattgctccaaacacaccagccctctccactcgtagagccttgcctggctcactctccctgctccagatatctgctggcctcattcctgcatgtccttcaagtctttactctcatgagcaaatgaaatctctctctccatcatgcctgcccgaccttccaggtaacatttctgcactcccagccccccaatcctactgtatgttttcttgttccgcagcattgtcatctagcatactgtataattatttattattatcctcctagataatgtaagctccaggaggccaggggtcttcatattttgtttactggggtatctgaagtgtacctggtacatactgggcactttaatatttgctgaatgggagggagggaggaaatgagaaagagagggataccaacgaacaatgggcctgttgaccataaagtgctgcttcaagaaaacattctttgaagaacagctctccatagactcttaaaaggtcagcttttattccaaaatattataaagaagctcagttaagactggaggtcttggtcactttgttggaatagttgctttttaaaagtctacattattccacatttatgcattcttatagctacaaaaccctactgtgaagacctccactttagtagttctcatcaataagctaattcctatgtaaattggcctaactaaattttcaatagtttctcagtggttctcttcttgactgtcacctgcagtgatttcatagttcaagcagagtaaaatattctgatttatggtattaggataaatttttccagtgatctcattttttcctatttctgaacctttctcagagggtgaagagcatggagggcctgtcaggctctatgagagtccaataaagagccactgtttgctttttctggttcattctctctactttccctgatccatgtagagcatgtgtatgttcagggcctgacagaaagtcgaggagaccgagtgcctgacaccgtccaccagcccaacagcaaaacctcttcttcagactaaatctgcttctagcttatagctactttaattgtacaaatgacgtcatttgacttttttctcctgtttttatttttatcactttagacttttaaaaaattgttttctctctttcctgaaatattgttacctttttgctgggggatgagagctaggaagcattcagcataaaggagatagctctgtgctgggcttctatcctcaaaggagagatgacatttctgccatttcaccgggcccaaaatgttctctgcagaattcaacaatcacagtggctctccctcccattctgactctccttgagtttcttgtccaataaagacaaagatcaagtcttataagttacttctgcctcccatggaatagtaaacacaggcttataaatggatccggaaactgctagaataatgtaatacctgattcttagaaccatttagtcctcatatgagaaattttatgttatgaactccatggtctgacatgcacacgtgcacacacacacacatttgcaggatgttggtacagctttccaagtcaccagttctacatattgagaaggaagcaaatgggaaatcttagccaaggccagtccctcagttgaatccctccagagtcattttgcaggacaaggactgtagaaaggcataatagaacacccataatgttgatactagaatctcttctgtattggggttatctaagaaggaatctggtcacattgattctccctccatcaaaatgaggatttcaagagaattctcttaattaatgaacagtcacctggagcactcttttcatatgcaggttccggatcccacctgagattctaacctagtagactggtgatgaactcaggaatctgtctggttaaacagttctttgagcagtgctgataacctgccagatttgggaaccactactgtatggaccagttttcttcaattccctgccctcacaaaaactaaggagatgatggctaggattaacagttggccttgataaggttggagctgttttctccaacttccctacaaaagacagagaactttcactttgtgatccttaaagtagattcctttaaagtagaaaatattttacatgtaacccaaatataagatgagaattactttaaaatgagacagagtagtaaaattccattaataaagtctgtggccttttaaatgttgcatatgcttttcagtctgacataagtatccctcttttgactcaacttcctttttctttgttgtttactattcagttaacattaattgagcacttgctctataccaggtgctctggtaggtatttttatataggtgatctcatttagtctccctagcaattctatgaggtgtaagcataatttccattctgcaagtgaggaaactgaggctaaggagttctttggagccaggtgcagtgactcatacctgtaatcccagcagtttgagaggctgaggcaggaggatcacttgatctcaggagtttgagaccagcctggaaaacataacaagacctcatctctactaaaacgcccccctaaaatattagccaggtgtggtggtgcacacctgtagtcccaactattcagggggctaaggcaggaggatcgcttgtgccctggaaattgaggctgcagtgagccctgatcctaccactgtactccaccctgggtgacagacaagattattttagtccctcttatctttgagccatgaatttcagctattccttctttcagatcctaaatttttgcttcctcttaacccatttgcttattagaccaatttgtgtaactgaaagcatacataatacaccaaattaagtccttgagtttgacaatatttgtactcagtgttgtagagtaacctttgaaatgtttgaaagttatgtccattgctgctttatggagtactgtttaaaaaaggctgttaggcctttttttttttttttttaagttctagggtacatgtgcacaatgtgcaggtttgttacatatgtatacatgcaccatgttggtgtgctgcacccattaacttgtcatttacattaggcatatctcctaatgctatcccttccccctccccctaccccacaacaggccctggtgtgtgatgtgaaatggggaaaggattccctatttaataaatggtgctgggaaaactggctagccttatgtagaaaactgaaactggatcccttccttacaccttatacaaaaattaattcaagatggattaaagacttaggtgttagacctaaaaccataaaaaccctagaagaaaacctaggcaataccattcaggacataggcatgggcaaggacttcacatctaaacaccaaaagcaatggcaacaaaagccaaaattgacaaatgggatctaattaaactaaagagcttctgcacagcaaaagaaactaccatcagagtgaacaggcaacctacagaatgggagaaaatttttgcaatctactcatctgacaaagggctaatatacagaatctacaaagaactcaaacaaatttacaagaaaaaaacaaccccatcaaaaagcaggcacaggatatgaacagatatttctcaaaagaagacatttatgcagccaaaagacacatgaaaaaatgctcatcatcactggccatcagagaaatgcaaatcaaaaccacaatgagataccatctcacaccagttagaatggcaatcattaaaaagtcaggaaacaacaggtgctggagaggatgtggagaaataggaacacttttacactgttggtgggactgtaaactagttcaaccattgtggaagtcagtgtggcgattcctcaaggatctagaactagaaataccatttgacccagcaatcccattactgggtatatacccaaagcattataaatcatgctgctataaaggcctttcttgtacataatattgaaattgcagtaaacatacaatggcttaatgtcatatttacttttggctaatcattcttgataaacaggctagcccatgatattcattataatgtcttacattatttttgtttaattaaatatgtggtagatgtgtaagcaatttttaagcagttttattctttgcaatggataagcaaattaagcatagtttttactttgtaatcctagagtagaaaaatttagtctttattattattgcatcttgaatgtagtcataaactaaaacacttaattgaaaagtgataaatatctaatttttttggtagcaaaataaatcttgcccagtattttagtttgttcaggctgctataacaaaatactttaaactgggtagtgtgtaaataacagaaatttgtttctcagagttctggagactgggaagtctaagatcaacatgtcagcagatttagtgtctggtaagggactgcttcctggtttatagatggccatcttcctgctttatcttccacatggcagaaggggtaagggagctttctggagtctcttttatttttatgtattttttttttatttttattttttgacatgagcttcactctgttacccgggctagagtgcggtggcatgatctcagctcactgcaacctccacctcctgggttcaagcaattctcctacctcagtctcccgagtcgctgggattacagctacgcaccaccatgcctggctaatttttgtatttttagtagtgatggggttttcctatgttggccaggctgatctcgaactcctgacctcaggtgatccacccaccttagcctcccaaagtgctgggattacagagccaccgcgcccagccctgcagtctctcttttgagggcactaatccccttcatgaggctccaccttcatgccctaattatttccccaaagcctcacctccaaatactatcacactggagattaggattccacatattaactttaggggaacacattcaatctatggcacctagttctccagaccatggtgctgtggtttgaatgtcccctccaaacgtatgttgagacttaattccccagtgcagccgtattgagaggtggggcctttaaagtgtgattggatcatgagggctctgctcttgtgactagattaatccattcatggagtaacggctaatggattaatgggtatcatgggagggggacttgtggctttataagaggagaaagagaggcctgagctagcacatttagccccctccccatgtgatgccctgcactgccttgggactctgcagagggtctccaccagcaagaacaccctcaccagatgcagcccaacctgggacttctaagcctccatatctggaagaaattcctttcttaaaataattacccagtttcaggtattctcttataagcagcagaaaatggactaggacacatgatttccaatgactgcaggacccaagttcacaatgcaagggcagttctggaaaaggctggcattcttcagtaggaaaggaaacattaagctgtgtgattttaccttgaaatccccgctattagttttgatagaattttctttggtcagaaatgtgtcattcacaaactaaaatttcctaaaaagataactgtggtgcttaaaaaaatagaaccagttgccaggagcagtggctcatgcctgtaatcccagcactttgggaggccaaggcgggtggatcaccagtcagacgttcaagagcagcctggccaagatggtgaaaccccgtctctactaaaaatacaaaaattagccaggcgcggtggcaggtgcctataatcccagctacttgggaggccgaggcaggagaatcacttgaacccgggcagcagaggttgcagtgagctgagatcacaccactgcactccagcctgggtgacagagtgagactccatcaaaaaaaaaaaaaaaaaaaaaggaccagttgtccttattcatctgcctcaattttgactcttctgttagatttgtccaaatgttggaccagtatttcagggaacttcctaatctctgactaatataatgtcagttactggattgtgaaaatcactcccagcatgttctacttgccccacttgaagaatatccactatttttaaaaaccctaacattaaaaatggtaagttggagacgatttgtgtctagaaatgatctttgcacatcaaagcatgttctttcaaatagaaattaccctattagatttaaaatatgaaatagttcacttaaagtcaccttttctttagcattagataagttaaacttgagatgggtttggtattaaattatattgttgctcactagtctcacagtgagattggagggaacatattttatacccaatttcggaagtttattgagtcataagagtaatccctgtttttggtcatacattgtatctagaacatagtcaaggtctcatctactaataaagctacaccccttcttctttttcagtgtaaattgagagatcatatatacaaataaactatagatgtatactgtaaaataatagttagaaagtgagtatccatataatggcttttcatatcaagaaatggtcattgccaacagcccagaagtcccaatataccctctggaactaaaaactgtcctgactttgggtataactgtcatcgtcttcataattttaccatctgcgtgtatatttctaaacaatgtggtttccaattctgaccttttcataaatgaaaccatgcactatattttcctttgcaactttcttcttccagtcaacattttgttgatgagagccatttatgttgttagacaacatttgttcctgtccactgatgtattagtattacattacataaatagttcacagtttctccattctattggtggacatctagattatttcaaattttgagctactaaaaaaattccccaaaataaatgaaacaaaacttgacagaactgaaaagaagtagagacaattcaaaaataatagttggagactaatgccccagtagtagaacaactagatagaaagacagcaagaatataggtttaaacagcactatcaaccaacatgatctaactaacatctatagagcattctacccaatggcagcagaatacatattcttttcaagtacacatggaacactctccaggatagaccatgtgctgggtcacaaaacaagtctcagatttgaaaggattgaaatcaaacagatatgtttattgaccacaacataattaaattagaaataaacaaaagaaaggtatttggaaaagcttctaatatttggaaattaagcagcatacttttaataggtcataaggaaaatttaaagacagtttgaactaaatgaaaatataaatacagcatatcaaaatttgtgagatgcggctcaagtggtgcttacaggaaaatttataactttaaatcctacattagaataaaagaaaacatcagataatctaagcttctaccttaagaaactaaaaagaaaagcaaattaaacctcaaataagcaaaagggcagaaatcataaagatcagagcacaaatcaatgaagagaaaacaatagataatatcagtgaaactaaaagctgattctttgaaaagatcaataaaatggataagactttacctagaatgagcaagaaaaaaagaagagacacagattaccaaagtgaagaatgaaaaaagagcaccgttattgaccctgtagaaattaaatataaaggaatacaatattagaaacaaattgaaatgaacaaattaaacattgtagatgaaatgagcaattcttagaaatatacaaattatcaaaactgacttaaaaagaaatattaaaaactgaatagacctatcactattttttaaatgaattagtaattaaaatcttcccataaagaagaacacaggctcatatgtcttcactggtaaatagtttttgcaaagaaataatgtgaatcctacacagactctttcagaaactagagtaagaaaaaggaatgctacccagctcattcagggaggccagtatgaccttgataacaaaatcagacagagacatcacaggaaaagaacagaccagtatctctcatgaacagagacacaaaaaaatcctttacaaaatattagcaaactgacaccagcagtgtacagaaaggattgtacaccataaccaagtcagatttatcccaggaatacaaaattagtttaatatccaaaactgaaatagtataatatgccatattagtagactaaaggacaaaccacatgatcattttaatagaccaagaatcaacaaaccacaacccacaggccaaatcctgcctgccacctatgtttgtaagtacagttttcttggaacacagctacacccacttatttatgtattgtctgtgtctcctttcacacgacagtagcagagtcaagtagttgtgacaaagatcatattggctcacaaagcctaaaatgtttattactgggccctttatagaaaatgtttgctgacccccacaatacacacagacaaaacctaacatctgttcatgataaaaattctcacacaactaggaatataaggtaaattcctcacctgacaatgggcacttggaaaaaacctacggctaacgtcacacataatgatgaaagactaaattctttttccactgatcagggacaaagcaagaatgtcggctcccagcacatgtattcagcattgtgcttgaggccctagaagagcatacaacaagataaagaaatcaaatgtatacacattaaaaaatgaataagtaaaactgtctgtatttggccaatcatgccacttcctgtctttctttgaaattctacccatgtttccaaaagcattgccaaaaccctctctccaagttcttctttaccattctgtactgtttttatctcctgctaccttgtgtattaatatgtatgtgtatactttaatctcatttcatttttaagttaattgttgtgttttctatgtttatgtcaccctatagcatattgacataatacactaccttgcacagaatagctacttgttaaatatttctgaataaaataatgcagtgtggttgaaagttggcttgggaattaagtttttgcttctaggtatcaagaccctaccagataatacaccctacagaaaacaactagaaagtctgaacatataatatgaaacacaactacttgaagatactggagaatgaatagaagcaaaccatttcaggctgtttatgctcatttagaggagaggaaacaggaagctatatacatacatttctatttccatggcttttagcctgggaccaagtacagtccatgtagttcgtggcatggtggcaagcacctcacatggaagactcttgatatttctggcctgggaaatcacagaagagaaactgggaaagcatgaatgctgaagagagtagaagaatcctagaagggaaagagctggaagggaattcccaaactgcctgtctacatctctgaatcatagcagctcagctagaaaccaaaactctgaactaagaccagctctgaagataccgaagagtgagcagatgcagagactctcatgaagagggtgcattcttcacttggaggatggaaaataacaaacctacttcctgacactttcagccttgggctgactgcagtgacagcatcacactgcacacagagcagaggtggggcacatgtggaaaagtagcagagcctttctggcctgaaaaccagaaaagagaagttgagaatccataaactctgaaaatagtggaggaatcccagaagagaaagagtcagagaaaggaatccttaaactctgccagtccacatctttgactaaaccttgaaccacacatctgcagaacaaactttaaacagcctggctaaaaacaaaagatcaaaatacagagttttcagttctagcccagacaagaatctctacagctcccctctcccctctcccctctcccctctcccctctcccctctcccctctccctctcggtctccctctccctctctttccacggtctccctctgatgccgagccaaagctggactgtactgctgccatctcggctcacggcgacctccctgcctgattctcctgcctcagcctgctgagtgcctgcgattgcaggcacgcgccaccacgcctgactggttttcgtacttttttggtggagacggggtttcgctgtgttggccgggctggtctccagctcctaaccacgagtgatccgccagcctcggcctcccgaggtgccgggattgcagacggagtctggttcactcagtgctcaatggtgcccaggctggagtgcagtggcgtgatctcagctcgctacaacctccatctcccagccgcctgccttggcctcccaaagtgccgagattgcagcctctgcccggccgccaccccgtctgggaagtgaggagcgtctctgcctggccgcccatcgtctgggacgtgaggagcccctctgcctggctgcccagtctggaaagtgaggagcgtctctgcccggccgccatcccatctaggaagtgaggagcacctcttccccgcagccatcccatctgggaagtgaggagcgtctctgctcggccgcccatcgtctgagatgtggggagcgcctctgcccggccgccaccccgtctgggaggtgaggagcgtctctgcccagccgccccgtctgagaagtgaggagaccctccgcccggcatccgccccgtctgagaagtgaggagcccctccgcccggagccgccccgtctgagaagtgaggagcccctctgcccggcagccaccccgtctgggaagtgaggagcgtctctgcccggcagccgccccgtccgggagggaggtggggggggtcagccccctgcccggccagccgccccgtccaggagggaggtgggggggtcagcccccgcccggccagccgccccgtccgggaggtgaggggcgcctctgcccggccgcccctactgggaagtgaggagcccctctgcccggccagccgccccgtccgggaggtgaggggcgcctctgcccagccgcccctactgggaagtgaggagcccctctgccgggccagccaccccgtccgggagggaggtggggggctcagcccctcgcccggccagccaccccgtccgggagggagttggggggggtcagccccccgcccggccagccaccccgtccgggaggtgaggggcgcctctgccccgccgcccctactgggaagtgaggagcccctctgcccggccagccgccccgtccgagagggaggttggggggtcagcccccccccggccagccgccccgtccgggagggaggtgggggggtcagccccccgcccggccagccgccccgtccgggaggtgaggggcgcctctgcccggccacccctactaggaagtgaggcacccctctgcccagccagccgccccgtccgggaggtgaggggcgcctctgcccggccgcccctactgggaagtgaggagcccctctgcccggccaccaccccgtctgggaggtgtacccaacagctcattgagaacgggccgggatgacaatggcggttttgtggaatagaaagggggggaaggtggggaaaagattgagaaatcggatggttgccgtgtttgtgtagaaagaagtagacatgggagacttttcattttgttctgtactaagataaattcttctgccttgggatcctgttgatcggtgaccttacccccaaccctgtgctctctgaaacatgtgctgtgtccactcagggttaaatggattaagggcggtgcaagatgtgctttgttaaacagatgcttgaaggcagcatgctcgttaagagtcatcaccactccctaatctcaagtacccagggacacaaacactgcggaaggccgcagggtcctctgcctaggaaaaccagagacctttgttcacttgtttatctgcccaccttccctccactattgtcctatgaccctgccaaatccccctctgcgagaaactcccaagaatgatcaataaaaaaaataaaaataaaaaaaaaaaaaaagaatctctacaatgtaacattaatattattcaggatacaacccaaaatgtcccgacatccacagaatcaagaaaatggaacacattttctgcacacagcaatcaagttttctaccccaagacgaaccagatgttagaaccaacaaagattttgaagtaactactatggctttcctcattttttttctttgcatgaaacatgtttttaatgcatgaacattccagcagagaaaggagatgtctcagccgagaaatagaaacaattaaaaagggccaaatggaaaaaagacagacagttgcagatatgagatgctgacaccaaacagaataaacacaaagaatctcatgtcaaggcattgtagcatcaaagctgttgaaagccaatgacaaaaaccaagagaaaaacaacaaagtataacatagtaccaaattcccttatgcgggaacaactcaattaaccttgcacttctcattagaagtcagagagtctcaaagagaatggaacagtgctaaaggaagttcttcaggctgagcaaaaatgatgccggatggaaactcaggctttcagagaggaaggaaaaatatttacaagaagtagtaaatatctaagtaaatatataacattcatatttatattttccattctctttgccttcttcccttcctccctttcctcccttctttctctttaatttttaaataaactaaaattcctaaatgacatggtggcaagcacctcacatgggaaactcttgatatttctgacctagaaaagcacaggagagaagctgggaaagcataaatgctgaagagagtagaagaatcccagaagggaaagagccggaagggaataaccaaaattatcacattggtttttaggatttataatctatgtagatgtatatataacaactatagtatataggagaggagaggagggatatggccctgtatggttgtgacagttgtatagtttacatgaagtagtatatatatatatatattttaatttttgtgggtgcataggtatatttatggggtacatgagatgttttgatacaggcatgcaacgtgaaataagcacatcatggagaatggggtatccatcccctcaagcatttatcctttgagttacagacaatccagttattctctaagttattttaaaatatgcaattcagtttttactgactatggtcaccctaagtaatatattattatctgtaagttgactgagaaaagttaagagtgtatattgtcatctctagggcaaccactgtaaaagtaataaaaaaatgaatagctcaaaagccaacagaaaaattagaattcttaaaaacattcaaataattttttccccaaagcaggaaaggaggaacaaaacaagagaggatttgagtagaaagcaaaatataatattggcagatgcaaacctaaccatatcaataattacatggaatgttaatggaccaaacactcattaaaaagcaagaattgtcagaatggataaaataagacccaactatatactgtctgcaaaggatatgctttaactataaaaatacaggttgaaagcaaatcagaaaaagaggtaccatgcaaacagtaagcataacatggctttactaatgtcacataatacagatttcaaaacaaaaccaaaggtgaatgaggatacttcataatgatcacagggacaattcaagaggaagacataacaggcacaaatgtgcatgtgccaatagcaaagcttcaatatcatgaaacaaaaagctgacagacaactccactgtgttggagacttaaccctccctcagcaactggtagaacgtctagaccagaaaaattcactgaagacatagaaaatctgaaaaagactatcaactacctcaccttgattgatattcccagaacatttcactggacagtggcagaaattcacattattttcgaatgtatataacacccttaccaagataaatcctattttgagccatagaacagatctcaataagtttaaaaaattagaattgtcaaagttaaattgatgaaatcaataaaagctagaaaaggcaaaactgagagagaaagcagatctgtggcttccttgggcccagggggacagcacagaaaatcatgtgcaaaggcacaggaaggggctttctactctgcatcttaattgtggtgtggtcacacaattgtatacaaacgacgaaatttatgaaattgaacacttaaaattagtaaattttatcttgtgatcatctcaagaagcaaaaaataggggaacagtcagtttggtcattttcatctaacaaatgccagagttcaattttaaattgtaattggagaccagaaaaacattgccaaaagggaaaaaagtcctcctgtgaagctcccgtgttgtgcagggcaccatatgtttcaccacctgagacaagagctaatttatggttagagcgtttaaagagtccaggttttttggaaaaaggaactatatacgagttaagcttctgaggaagacttaagagcattctttctccacattccttctcgcacagcccagaactagtcttgtaacagaagaaaagctatgaaagaatcaccctgaaaaaccaggcttctttatgtgcaatgagaagatttttcatctaaatatattatctgttaaaaagtgatcagggctgacagcagcagtctgttctgtggcatccacagcctctctatggtgttcccacggagaattctggtaataacagataccatatttttgcagtaccttcaagggttgttttaaagcagaatgtacaattcacctcttcccaggtgtcatcaggatgtgaacatgcagcactttatactgttattacattttacatgataactctttatataaaacataaaatggctccagaaaaatgattttatatggtacctactctgaaaacctaaacaaaatggtgcttgttattacattggtgttgtgaattacttgaactattacgatagcatgtttcactaaaacatatttcagtagtttacttttggcataatatctgcagcatggagaataagtgtcatctcaaagtagaaaggcatggcatttttcttaatgtgtctttcagactcaaagtttaaaacatcataatatttttcctgtgattgctactatttttatattcatatatctctacacacacatacacatacagagacacacagatacatacagagaaagattattccccaaaatgaaaatatttactttgagcaataaaattaagggtgagttggttggttgatccgttttgctttgcttttttgaaatttactttaatgttgttatactgcctgtacagtaacagggtgcccctgctaacacatttctgacattgccctatcaaaatggaggataaacattgccacagccccaatgaaagaaaaaatgtgttatcaagcttttaagtgtatggggtttaaactcttctcatgttacatcagatctttactgtaaactagccagaatatttcccagcagaaaatagtaagtgtgtcttcaactgcaaagagcacttcataaaactcgtttcactacaaaacagagtaaacagtcttttgatcccttctttttccccacctcaaaagttaaactgccattccttgtttccaagactcacagtagtaaatgttttgaattttccgtgttggaaaaattctgacatggcattatctactacccccaccatcaaaatgaagatgggactatgtgtctatagttttcctcgtaccagtggccattttcccaagcaaggatccagaaatgtgtattttcctcttgactctgccatcgattccctgtttatccttcactgaatccttctttccctacatttccttggctccataatggacatattggctcactttaattaaagattcctgagtgaccctgatccttggatgaaaatctgaagagagggataaggagtaatgggatgggagtaggggagtatcccacagcagtattcaggaaacaaaccttcagcattcaggctttgtctgtccccaaccaagccagcacaacctcctcctcaggggctgcacactcggccctcaaatgggatggtattgagactcatgttgatggacagaaaccaagaaggaagagaaagcaactgaaagagggaatgtccctggcttctcatcatcataagtacttgaggtccttagggttatgggtccttactgattgtctagctgtaaaatctatgctgttcgtctctgttcagcaaggagacacaggtgaaagctaggtttcctggcctcctgattctggggttgatgagcatcagaggagacacccagcctgtctgtctcccccattgcttatcagcagccccttcctcaggactctgtgagtccattgcatccagccttttccatagtagtctcaacattagtgaacttttaagccttctctgtcttctgtgcaactcctacccacatctggcttctgaatttgagacgatctgaaagcaaccacattcaaaagaaaacagaaaaacattttagttctcttggaacttactgtataagaaactcatgtgctttgcggaatatttacaagtaacggttcttcagattaagtagaggtctcagctttgcttttggccgttaaactcggtagtcatttgtagctctgttctacaaagcacagatgagtatcctctaaataactcagctttcatgttatgaagcagactaattctcataccacaggtaatgagccctagttttgaatcaaacgttttgatttttccagtttggcttattttctgaatttaaaagtaccatgcacaattatatgtagacaattaaagtttgaaatggttcctaagcacaatacagttatctctctgtatccatgggagattggttccaggaccccacccccaaaacacccgccatagataccaaaatccacagatgctcaagtccataatataaaatagtgtatttgtatataacctgtgtacatcctcctgtatactttaaatcatctctagattacttacaatacctaatataatgtaaatgccatataagtagttgttatactgtatcatttagggataatggcaagaaaaaacagtctgtaatgttcagtgcagatgcaactatccttgttttttcctcagaatattttaaatccatggttggttgaatccagggatgcgaaacctatggatacagagagccaactgtgtaaatttagttttgctttttatttataagctgtggaggccaaaagaacctagctgttaaagtggtcatctttttcaattcatatgactgatcagaatcacaactcggatagttttaaaataagctgggagactccctttcccttccatcttaacgttttgataccaaattattttaccttaataaagcgagtgtaacactgcctccctatagtgaatgcacagacttctctacttatcctgggcctggacacaacccaactcagtgtcaccaagaatccaaaattgaagtcaaaaaaagaatgtgtcttgtggttccaaaaccatggaagaagaaaaaatggattaaatggttaaagaggaagcttagggctcattggcattcccccattccttgttttagacgtggttattatcggtgggtgaaattagcctcagcctctctgtagacctccagcatgtccttgttgctgctgtgacgtgggtttgcagggtgaatttaatcaactccaggcttccttactgccaggccaaggctgccagcctcttgaaagctcactcgtttcagattttgtttttttgggttttctaattttttctaattgagggcctgaagccattatttaagacttttccaaacttctcttgccttcaagtgttcatttgactattttatgggggtggggggaggtggtattgtttgtgttttctaagcaaaccaaaattacatattttttaatctgtcaagttaacctttgacaaaagtttaccttaattcagtaaacatatttgtactttggccaattctgaattaacttgaaaagtgttaagatatttttaaatttttaggcataaatatagcacatatagagttatgagaattgccttttagtttacttaaacataaagatactcatttcaagtttaaaatgtaaatgatcttgtgacgaatgaggctattcacatttcagatgaacttgtttcaatactttgaggcactttctatttgtcataacttccctgagattgagtcactatgttttactcttatttatccacgtatgtgttcatttttatacattacattttcccaactctaaatcaaaactgaatgccaaggatattttgtttttggttggacgaggggagttacatttaaatgagaagactattaaacctgctcttctgaaataattttaataggcatatgtttccagccctgcaggtttaagagcctagtctaatggaaggggcacacgatagcaatgtcctttcttaaagggatatcacatgtttgtgaagccctatcagttgtgcttcagcaagggctctaaatggagtctggcagctctcctatttgcacggcgctgtctgtctcagcaatgataagcaaagacaggctgactccttcaaggagcctttcataaagtctcagctctcaaacgttccgaaactcactggtggactttcccctgtggaccattcatttatcaggaaatgaaattggttacagggtttctcacgttgccaaacctcactgacgaaatctggtttcttccaaagttcaggaaaagcatttactctattttgctgttcactacttcttgtctttgtgggaaccacagtcaatacaagggtttgagaactccacaggggaaaggttggagtgggaggtggccagggagtgagtctgggggctactttcatagatatcaaatcccatcccttttgaatgggattttttttttatgttggcattttcgtctttcaaactacagtgtcagtttcacaggagtgattttttccacttcaaaaatgaaatcctttaaacatgacacgaatcaccttattggcagcatagctttgtaacttagaccagagatcattgtttaaacttcgtgaaactagaaggaacaaaaataaagagaaacatgtagttgtatggcacagagaatgtttggataagtgaaggttaaattattacaaagtatgtaatctagttcatatgtttaaggaatggaactaggctaaattatctaaaatattctgacgtactgaatcatttcattttgtaaaacaaaatctgactagcagggcattctgttgtaggccagtctgttgagtgcagtgtgcaacctcctgtgtttggaattagcaggcccaggggtaaggcgcagcgtgcatgtggcagttattatggctgtggaagtggttgctagctaattgatagcagtagcagtagaaacaaccttatttaattttcaatagtccctatgacaagacgctatacatgggatcctttgtagtcttaccattattgtcctttctctccctgccattaaatatatggtagttaatatatacacttgatgatattaagaaatgaattccttttactcttttttccccctttggagcggcttcacatttgacttctaaccctgattattttaggcccccaagtaagtagtgatttactatcagtgagcctgttacccttgactgttgtagctccgatttgctaaaaatgtacttgtggtcacaaagccacctcttagcctatgctggctggtggttttgctcataatctgaaccccaaagagacacactggttccataaagggaaaatgaatgaatcgtcttctctgttcatcacggggagataagcttttgtgaacttgaattgcctttagagcattgtgtccgtggtttcaattgtatcacagaatgttacacagactgaagttaagtggttactttttgtcaggggttatcttatttttctccattcagtttaacatgtgtactgcaaaagacagtatttttggaaatgaaggcatagtctttcatttaaacatgcatcagagggatttcactaatgaaagcattcaaatcatgtgcctagttcttgtttctagcagcctctgccattaaataaatatcagtcttatcaaattcatgcattcaacatttttcctgttgatacaggcatgaaaaataaaagcaggtaggcactataaaagatttgccttcatctttggtgatctgtatcccagccctaacctacaggaactgaaaatgaaaaatcagtgattatttttgtcctttataaatggtctgcacattccaccatacagcctctcattgctaacagtccctattgaagagaaaacaccaaacccaatattgagagtttttcaaatcagggcacaatggggtataaggaaccatgtggactcttgatcattatatttatttatggtgttctcacagtctttaggcctctgagtctttgaataaatatctccaacatccagcggctaacattccttttcctacaaagctactatttgcaatagagattttcttgtctttcatttatttgttcaactagtattgattgagcaactcctgcctgcacagcactctgctagtggttgtcccttaaagaaccttactgtttaggggggcacagtttctaaagtagcattcaaagaaacggcttctctactcccttccttttcaaatgtgaggaacttaagaaaattagagaacacaaatgggcaaagggggcttgggaggcaaaagaagactgttcacactcagaggactttgagctgcagtggtttccttgagtgtgaaatgaagaatggctgtggacagaatgcagattctgaagcacataagtggagaggcaggtgggatgctggagggctgagagtgagtccccagtcctgcagtctggggcaagttatttcaccttcactgtgcatcagtttctcacctcaaggacaggtctaactcatcaccttacctacatcctggaatagttggagaaatcaaaagaaacaatgcacgtaaactccctagcacaaagcaagctctcagtaactgttagccaatgttagtttctcacatatctatcaacctcacttttccagaacaaagccaaaaactagagttgtagattctgaacaatcaaaatggatggctcggagctcttgtcttgtactttattaatcagggagcctcttgctcacagccatactctttgcttgatacaagttttgtttgtttatttgtctgtttttgagacagagtctcgctctgttgcccaggcgggagtgctgtggcgcgatcttggctcaccacaacctgcaccccccgggttcaggcaattctcctgcctcagcctcccgagtagctgggattacgggcatgcgccaccacacccagctaatttttgtatttttagtagagatggggtttcaccatgttggtcaggccggtctcaaactcctgacctcatgatccacctgccttggcctcccaaagtgctgggattacaggcgtgagccaccatgcctggcccaatacacagttttaataagcttagccatctggttcccaagtccataatagactagaagccacaacttaaaagaactgctacaggttagtacactaacagttatgaaaatcaagggccacttgttctgattagcaagggagcaaaacaacacacatgagtcttacttttataagtatatgtgttgttttataaactaaacaacacacaagccttacttttcagtatcttataagaacttttacatgctactcatgaaaatataccaaaaagagttgtgagtctgtggcagtcatgaccctgaagaaaagttgggatgatacaggacatagagctggtatcatctctacccttgagaaacacaaagccctgtctttgagaatagcgagtgggtgacctaagcccaaagaaggctcaaggtgccagtctgaactttcagaatagataaattgctgaatgattttctttagcaggttagttttctttttattttactttgggagggatcatagcaagattcttgtaaatgctgactttaatgtatgatttggtgtataacaatttagtttattcactattttccatgaacacgttagtatctctgtcaagactaagttgtctaatttaactcacgcatcatcccatctatgtaggtaattattttactaatgtgttgtcaaatgagggtaaactaggctaactccaaagatcccttcttccataatcaatttattatacttcttttgttttgcctgtgtctcctcaatatacattctattctcacaataagcaaaaactgaaaacttgacattgtaaactttctcctggttccagtgtttgtatttatgaaaaaacatcaattccatgcagatgtgttcatgtgaactatttagaattgaccctgattccgaatcccataagtgacactttccagtagaataaaaaagatggcttggaatgtaatcacttctggagaggaaataggagaagctgtttccttcttttagatttccactcttttattctgctgagagagggcatagaaaaagggaaaaaaaggaatttctcctcatcctcagcatatgagagctgtatgtggctttttaagtttttaaaaacgcagccaagtgtcagggtacccagttcatttttggagttgttctggcttgtcatatactcctcacctccagcagtccagcctaacaaaagctgttacaatgacttaaaaacaatattctctggagctcctttcatttctaaggagcagcatcaaactgtgccccttctccattgtaagccttaggatttgtgggaaatgcttttgtttaaagaaaggtatgaaggaaccagtcatgaatcttctgttcctaaggaagtggaccaaaaaatatcctttctctcagcattagttgttagaatggagaaagaagagatacttgagaaaccctcttttcaacccccttattttggggaaatgagaattgcctcatccaaggtcaccaggctggtgggggcagatccaggctcctatcctggacttcctgactgcacctggtcatgtccctttgtactacacatggcttttctctgcattcaagggacactgtaactgttaatatcagtccacagtcccctctcaaagcagcctcaaaaaagcttgaaagtccaactattactagtcattgcccctgtgctattctttgtgtagaaggatgatgccatgagttttggcttgatgtttatgatgtatttatgttaactcaaattctctttcattgacctatcctctttgtgactaatgaaacgcctttgcaaaagggccagttttggaggggtgggtgttctgtcagcagtaacatctcagatctgtttatgccttggagggaccatgtcctcaggctagatctcgggggctcagtattctagtaccataaatatttttagaactgtctttttgagttctactttcatgcacatttgtgactaaatttaatatttttaactggcatactttattttgttatgtgttatttaactgcaagttgatctttaactggccatttgagaggcagattcttctgctctgcccctgcatgtggcatggacaattgtttcaggataacgttgatccctcccagttctctgaacatggcatgcacgctcccagcctcagcctgtgcttgtttcccacgagggccagcgaaggccagagattctccccaagattttcacacatcannnnnnnnnnnnnnnnnnnnnnnnnnnnnnnnnnnnnnnnnnnnnnnnnnnnnnnnnnnnnnnnnnnnnnnnnnnnnnnnnnnnnnnnnnnnnnnnnnnnnnnnnnnnacatcaccccactccttcccctactgaacctccataacacatcaccccactccttcccctactgaacctctataacacatcaccccactccttcctctactgaacctccataacacatcaccccactccttcctctactgaacctccatagtgcccacatcaccccactccttccccaactgaacctccatagtgctcacatcaccccactccttccctactgaacctccataacacatcaccccactccttcccctactgaacctccacaacatatcaccccactccttcccctactgaacctccataacactcacatcaccctactccttcccctactgaacctccataacactcacatcaccctaccccttcccctactgaacctccataacaatactcacatcaccccactccttcccctactgaacctccataacactcacatcaccccactccttcccctactgaatctccataacactcacatcaccctactccttcccctactgaacctccataacacatcaccccactccttcccctactgaacctccataacactcacatcaccccactccttcccctactgaacctccatagtgctcacatcaccccactccttcccctactgaacctccataacaatcacatcaccccactccttcccctactgaacctccatagtgttcacatcaccccactccttcccctactgaacctctatgacactcacatcaccccactccttcccctactgaacctccatagtgctcacatcaccccactccttcccctactgaacctcaataacatcaccccactccttcctctactgaacctccataacactcacatcaccccactccttcccctactaaacctccataaccctcacatcatcctactccttcccctactgaacctccataacactcacatcaccctactccttcccctactgaacctccataacacatcaccccactccttcccctactgaatctccataacacatcaccccactccttcctctactgaacctccatagtgctcacatcaccccattccttcccctactgaacctccataacatgtcaccccactccttcctctactgaacctgcatagtgctcacatcaccccactccttcctctactgaacctccatagtgctcacatcaccccactccttcccctactgaacctccataacactcacatcaccccactccttcctctactgaacttccatagtgctcattatctacaccatttattagctgtttagtatatgctgcttctggtaagatcttaactatatttcctttttccaaactcggttgtaacacctgatgtcaaggacctgctatctgcctttttatatccccagtaatcagcctgggaccctgtatacaatagacacacactgcatgtatcttcattgtgatgggatgaagaggtatgagtggccaaagtacaggaggctatgttggccaagatgcaagtatgatagccaccttgtaagctgtaacaatatccagggaaggtttgatatagggcaagatcagggataagaaaagcagtaaagaaggtatgatgtggtcatgaaaaccttaaaaaaaaaaagaatccaaattgtacagatactttggaaaccagtttggcttatctgctaaagtcgaacagatgtatatgcatactctctcccactcctaggtaagcatctaacctaaatgcctgcccttgcacacgaggagatgtgtaagaatgttcatagcacaattgttcataacagtccaaccctggaaacaacccagtgtccatcagtggtagaattaattaataagttgtggtacattcaggcaacagaatacagcaatgaccgtgaatgaatcacagccaaacccaacatgtttcaatctcacatgcataatggtaagtgaaagaatccaaatacagaaggttatacactgtgtaattccattaacataaaattcacagatagaactcgccgagagggctatggaatgcaggtataggtggtaaaagtaagtataagaaagagcagggagcgcctaccacaaaaatcagggtggtgatggccagggagatgggagagagttccctgatcaggctggagcagtaattccataagtgttcaccttctgctataggttggtgcaaaagtaatcgtggtttttgctatatggcaaaaaacgcgattacttttgcaccaacctatttagttgttacacttttacacttgggaacttttcggtatgcatattatatttcacaaaataaaagttgtttttataaagtggggaggagcggtccatgaaggctcctttacttaaaaagtgaacaaactatggtaagtgatagaaatgttaaagggattccaatgaaggtaaaaatcacctatggaaaattattctccctctttccatttgcatataaaaatcaaatgatttcacccgttttcgctctcctaagatgtgatctatgcccctcactaaaaggactagaaagagatacatcaaagtatttcatagttgttatatgtttggattgtggaactaattttagtgataattttataagccctgtttttaattttttttcagtgaataatatatttgattttactacaagcatgtagttaaaaaaaaaaattgaggccgggtgcagtggctcatgcctgtaatcccagcattttgggaggccaaggtgggcagatcacctgaggtcaggagtttgagaccagcttgaccaatatggagaaaccctgtctctactaaaaatacaaaattagccaggcatggtggtgcatccctgtaatcccagctactcgggagggtgaggcaggagaattgcttgaacacaggaggcggaggttgcggtgagccaagatcgcaccattgcacttcagcctgggcaacaagagcgaaattccgtctcaaaaagaaaaaaattaactgtttcactagaaaaaggaaaacatggcctaggcaatatgagttagaggaagttgttgtcatgaatgtatggacttggagttagcagagttactggttttaaagcaaataggaatgggaaaatagtttatatccctgatttctctaaaatcaagacccaagccttctgtgggtattttagtgacgtgcagtgcaaagaagcccaagccaagcttgtgatttgtctgtgagcacttgcagccaatttgtattttttagttactctctctgatctactaatgaagtggctaaacaagtaacttttaagcataacttaaacagttcaatgctttcagaaatgagtgtagctaatttaaatcatgtaagtaagtaaaaactttgagaaaacaatttgttaatagcttagcaacccttggggatagaacatctgtgtttttaagagacaatgtttagtcatgaagtgactataaattcatactagatacattatgaacaacaaagaggttgaattccaaaacagtatttgaaagtaaagagagaaactacaattttgaacatggtaaaaattaaacctaaatttattttagttgcagatttagaagtgtgaaaaggaaaaatatatacgtattttgaacatgctatcccagtgatttattaatagagcttaatacactcttgctggagatttcaaatgcctgctagcctctccacatataagtgcaaaggctaaaacttcccttgcatcagtctagctagttttgtgttatttttagttttcaagtagaatttaatcaaatagatcatagagcggccctcagaaagtgaatgggaaatttcttactgttaacagtttctttagggagtatgaagtcatagaccctggtgtggagagcttcacagaagtggatctattttcagaattatgtttgatgtgaatttttgcacgtttacttcaaaggcattttcattataagtgacaaatgacttctgaggaggatagaataaaaagattagcttaaaataattgaaatctgagaagttaattttgttgaccaacgaataggtttatgaagcatcccattttgaaatcagaaaatttatatttccaaactcgaatctgcctaaaaatgctacttttccaggcatggcagttgttctgattagattttgtataatgtacatgattagactatcagtttcatgtaggattctatataggtttataaattgtaaactctcagtatataataaattaaaaataagaaggctagtccttttgggagtgactggttctactgtctcccttctaaaagtaaagttattttcattgtttttgcatacatgactgtattcagattttttcccaatgtctaaagtgcttcttccctacccaaactcacccctttctcttagggtttagaaattattaccttcagccaggcaccgtggctcacacctgtaattccagcactttggaaggccaagtcaggtggatcacttgaggccaggcgttcaagaccagcctggtcaacatggcagaaccgtgtctctacaaaaaatacaaaaaagttaaccaggcgtagtggcaggtgcctgtaatcccagctacttgggaggctgagatgggagaatcgcttcaacccaggaagcggaggctgcagtgagccaagatggcaccactgcactccatcctgggcgacaagagctaaactctgtctaaaaaaaaaaaaaaaaaaaaaaaaagagagagaaagaaagaaattactaccttctcagcaaagcctttccaaccacttagcagcccagctattagagcacttcatattttgaattatcaccttgttgtatggttgtggctgtcccattagagaacatggtccccccaacagtgactgtcctaaaccacatttagtttcttagtcctgtaacagtgtttttcatgtatatatttctttagttctgttcatatatctatttacaaaatataacttatttcccaaggtttttagtaagagggaaattctttaggcatggatttaaaaaaaaaaaaaaaaagaaaagaaatctggcttttctcttttgattaattcctaatcttgcggtttcactcatccttctcatgtggtttctccctggacagacctgtgtcaggtgtgggaaattgggcagagaatgtaataatctcagtggagggttctgtagcagttgttttttaacttgctgaatatgtgctttttctcttatttgttcctttgtcctaaaaataggtgtgctttagtgaaagttccaattagtagggttccatttcctgtagattttgctacactggaagtgagaggtggctaaaaaccgatcatggcaaaatattccagacacagaaagctcctgcacagggagttggttgccttctgcccacagattaaggggtattgcctcattggctttccaggtggattataatctccttcccatcacgacatccatttccaccctcattttcaaaggtggaaaggaaacaggatgaggaagaatccctggggtgaaatttgaatgcacacttctgaaggggagcgactttttctaaactttgtaaagagggtgacccctcactgaagtcagtttttctaagctggaaccgttagccctagtgtgttccaaagactcctatttcctttccaaataattcaggagtcaggtggaggagaacaaatggcaaacagcatggccacccgtgtgtgttctgtgcatggcagtcagggctgggcactgtgccgttggtgcaaagcacctggagtctagtccactttaactcttgtctcgggaatcttaagggctcgtggttttccctgaaacctgtgggaggaagcttgctggcttcacatttatggcaggaggaccagaagagtccatcagtggctgtatttgcaggcctcggagatcccacagtcaaggcctggggactgactaggtcatagtcagcaggtcctgagctgggctagataagagtgtgcttcctagactgtgatcagaaagttaatcgttggtgacagtgagtctgcccttgttcctaagccattgttttagttttgtaagatttatagggctgacaatcagattaaaatgtatagaataagtaaaacctccttccttcagaaatgtgtattgggactttctcccagtctctctctccccgttttctaacctttgaagataaaggcaggagaattataattctgacaagccttccagacagcttgcttaatctgggctatgaggctatcaggcctggaggcttgtctctgcagctactgctaaactgaacatccaggcaccatgaggtcagctgcacagagaccctttcccagaggcaaactggctcaaagagagaccgtatcagaaaaataaagacttattaggatggagccagatggaggatggaaacagaattttatttgtgtgctcttttgtttctagggaaaaacaaaagcaacacaggtcactggactctaaacatatgaagtttgactatttacagaggaagctcttggattcatttctagatctcttccttcccagccctgatttccttccctttctggggagaggcagctgtgaagagctgccaagtctctctgcccactcaccctggtggcactgccagctctcctctgttcccactgtcatctttgggtcctggccctcagcccccatcgcctagaccctgcactagtcccccagctgctcccctccaagggctgcttccctcccatccagagggaccacattgtttcccaagtagtctcccaagagcacgctgaggtcctgggcacagctttgctcaggtgcgtggagtggccccactttgtatgcagaaaagtctaggctcagtctcagcagatctccataaacctgccttccaagctattttcacattccccctcttattctcaaacacaccggctggtccgtgggcacccttgtgcttttctgtctccctgtctgtgcttctattattcctctgcctgggatgcccttccccccacctccacatgcccaaatcctaccctttgtttacagaccacctaggtgccttctcctccttgaagcctttcttgatgcttccagtttaatttctcccttccctggatccccacagattacacttatttgcacacttcagatgatattatcacctcctatcttgtctgatagttatttttgtacatgttttatctccatgtctagattatgaacaccatggttcggaggcgctgcctctactttttggtatcttctgtggcagtggtttccattgagaagccattgagatttttttaagcacagagtaacatgatcaggtttttattatggacttttttgttcatgcccccctcactacccaggaactgctcagaaagggatggttcaaatctttttctcagccaggcttctgaacaatttccctgactaggcagtgccttacacttctctcctctccatcaggaccaccccaggtgaactatcttgccagcatcccctgactgtacttttcacggtctctctctctctccctccttctccctctccctctctccccctctctctctctctctccctccttctccctctccctctctccccccacctccctctctccccctccgtctctcccccctcccccctcccttcccctctcctcctctccccctctccccctctccccctctctcccccctcccttctctaagccaccctgtggcagagggtactgttcctcactcagcaatgcctgacctggggctgcatggcacacagagagcctaccttcaaatcatttatgtccagtagtgaatggaaactatccaaacccatgtccagccaggcactttgtaggaaatatacaggtaatgctgtaagcaggcagatactgggcactggagaggaccacttaagactctggagggagggaagcatccgcaccagcactgtaggaaatggaagtgtggtgggaaggacatcctagctataaagagacctgtcagaaaaggcatggaggcgggcatttgcctgaagtgtgcaggggaccccagggagctcacctggcagaggctgatggtttgcttaaaggagaggaagcaaatgaagctcagaggtcctgggcacccagtttgtggagactccagagtccatacaaatcagaactggcaattattgcattgtactttctaacattaggttatgttagaggattgctttttagtgattttttttcatttgcatttatcttagctctccaagtaaatgttaagatccttaagggcagggaccatatttcatatttttattaaatgcttttatggtacaaaacgtcaccctataatttattttattctcatattgggttttcttaaagcagggtaaaatgttcttacctgtttaattaggttaatatttaagagtgaaaatatataatgtccagaattaacatcaaactaattcagaggagggaagttggggtagcttaaatgagtgcccatgagttaatggcttgtagctggttgatgggcacacagtgttcactgtattattttccccactttggtgtgcatgggtaattttccataataagatgttgggtctccggtggtactgagtaagccttcagcttgcaggactcccagcacagccccctccctcataccaccacactgtgtagcagccacctgggcccctaactgccagctgagccccttgctacaggcctgacttccggaacagccaggaaaacagctaaggatcaaccattgtgttagggtcctggtacagtcacagctcagtgatgcagacccatcaaccaggtggcaaagatgaccattattttgtatcaccattgtatttgttaaagcactagtgattacagttataatgtaaatattaataaaaaggaaagaaggatgcatgggtgagcaggtcaccttttgtcttagttcgctggggctgctataaccaaatactgtggaatgggaggcttataaacaacagaacttacttttcactgtcctggaggctgagaagtctaagatcaaagcaccagcagatttggtgtctgctgagggcccactttgtggttcgtagacagcaccctctagctgtgtccttacatggtggacgggactagctggctggctgtggtcttttctataaggacactaataatccttgcaagagggatttaatcagaagttttatcttgaaacatctttcttcatcagaaagtgtttcgtatgcacttagaggtagaaaccatagaagatgtatttacagtataagtttctctttaaataagcacatcattctgtcttccttaaatctgctttttcattgtacaagttccaaaactcagatgttgtcaccccttttgtgctgagcatacattagttctctctaggggaaatttagagttttcactttttcttatgtataacaaattttgatttaaaaaaaaaggtatgttctacatcctcttgctctaaataaccccaaatataagtgtcttattatagtatgttgattatttaaatttggaatttccttttgaaagatcctttaaaatgttttatgggtgtttccaaggtaactctcaatgttgtttaattttcatgcttacagtgtataacaaattgaattatctatcattggtcccttaagagataagcagtgtgtctttctttattgaaatatgtaaatttgtgtcaggcagtgtggctcacacctgtaacccaagcactttgtggaggtcaagtcaggaggatcacttgaccacaaaaccagcctgggcaacatagtgagaccccatctctataaaaaatttaaaaatttgccaggcatggtggtgcagacctgtggtcctagctactcaggaagctgaggtgggaggatcacttgagcccagaagtttgaggctgcaatgaactatgatcatatcactacactctagcctgagcaacagagcaagaccctgcctctgaggaaaaaaaaaaaaaagaagaaaaagaaaaaaatgtaaatttagcaaaattggagcctgtgttataaaatatgagtgcttgctcttaattccttgttttgaaaatgactagagatctccaaatgcttcatctacagatgttttacttgccttctggggcattgatttgaaaaaaatcatgatagagaagggaaaggtcttgtattttccagttgtcctttggctttgaaccttgttccaaggcagaagatggactcctttgaggcccttctctgggactgcttggagaagtcagagcaaggtgctaacagagtctagccagcagttgtgcctggccctcactgggcctctcagccctgcctgcaccacctcaacatcacagtcagtcttcagctccagtctccaccagtcagagcagacctcatcagccgtaatggtttatagatgaagtaactaagtgtcaaagagggacatggtttgtccaagtttattagtgtcagagccacctctaaaatccagacgtcttgaattttccctccatgataccattcatagcctaaatgggagaggtacatggtagtcttaaaagtttacacttcgttttcatggtatttattgaaatttcaagtaattgatcagtgcgacagttgccatggggagcatgaaatgccagctgcctactgctcttctgccttccagcctgtctaggctgaggagaggaagacagcagatgtcatggtggtgtgcctggtgcagcttcagctgtcagactaggaacaatggggcagggcgactcctgggccactaccaaaccccccgccccagttaacatatggggcaagtgggaatgagcatgactcccagctcccttgccctggctctttctggccccatcgtgccacaggcctgcctgggaaacactgtgcatgctcgtctgtggccctgcctgagccagcccctgagcagtgtccacgagagacctgggctcaaggagcagcagtctgcagaggtgaagtccttcctctctgcggtctctttgtctgattggtcagcatcactgctttgccacctctgaatgtactttccctctatcctgcccatggtgttattgctagttcataaagttgtaaactgtgaaactgctcccttcataagaaaattaccaaaaaaaaagttcagatcacatggatttataccagtgcagttaaatttctagcctgcccaaggccagatcaagaccctattttggatatggtgagccaggttttacattgctaacacactgagatatgaaacttacgacctatgcctttttgtacaggaaagggtaaaagcaggaattggcccaggccatggctcatacctgtagtcccagcactttgggaggctgagatgggcaacagatctcttgagccccagaattcaagaccagcctggacaatgtggcaaaaacatgtctttacaaaaaatacaaaaatgacccaggtgtggccgggcgcggtggctcacgcctgtaatcgcagcactttgggaggccaaggtgggcggatcatgaggtcaggagatcgagaccatcctggctaacatggtgaaaccccgtctctactaaaaatacaaaaaaaaaaaaaaaattacccagttgtggtggcatgcgcctgtagtccctgctactagggagtctaaagtgggaggatcgcttgagcctgggaggttgaggctacagtgagccgagatcacaccaatgcactccagcctggccaacagagtgagactctgtctttaaaaataataataaaataaataaagcaggaatcatgaatgaaaaagaataggcttttattaatggagattcaatctttgtttcagcttacaaatacgaatatttttacactcattagccctctgtgaagattctcctctcctcagtggcatgtagcctgagagccaaatcctgtttgatttctgatcacatcacctgtcccttgcttattagctttctctactttggttttggaaaacagagtttcaagtattctctttcttttctactctgacagtgtcaatgaaaatggcctgtcttcagtggcttttaggggctctgtggcaatgctagcagaaagcagggcctgagcccatttggtggctcttgagtctctgagttgtctgaagagtcctgcctccatttcaggaaagtgggagcagagggtgacagctgaagagacaggaacgacttgagaaaccccaaagtttccttcagcctgcacctcccccagccccctcattactcacttcccctagccaggctcacgtggctgctgggctgagtcgcctcagctgccgtggcagtgtcaccacctccatcctcactggccagcagcgggaagccgttgttccattagagtcagccgctggttgcttgttcatcttttggtgtgagccctcccaggatatttcctggaacgctggagggaaacatttcttcacccagcctttccaggcttcagctcatcgtagtctttgccttcccattctcacgaaggcggggagacctttgtccaagaaagggaattcaggttactcacccacagcatgctgctgtgctttcgtttagcattctgcccatttggccctcggcattttgggaagctctgcagcttggcctggggctactaatgggcaggatcccacccaatctgttgagaacctcaaagacagcatcactgctgtgggttaggaaggactcttggcacctcgtattcagattctgtctctcattagtatcatcatctttgaagacagacagcagaattctccacttttgcccccatctcctaccttggaatcaaaatattctccttctcccagcctcctaagtaggaattgatttgcatcaggcagtttgactcagtaatgcagtcagccttcctgaggagttgacgcgtaggcaacttcacctggtgccccgcagctgatggcttttagatcacgagtctctgtcctccatctgtcccctcgactctaggcttcccaggtgaacaggcttccctcaaggctgcctccgtgcctccacccacctctccaaacttacctctagccacacctcactgcagatcggccccagaagggtgctgtcagcctctgtctgctccagagggtccctccacatgcagttccagcaacccccaccccagccctgtctccacaagtcacaaccctgcccacacaccaaggcagcaggagagtctgtaccttcccaccagcccccagaaaagagagagaaattgaaaaccgaagattaagtttctctcctttctgtgaatccccttagcctgggtctgtgacagaggtcctaccagggacatttgctcaagattcagactcaagggggcttccagttctagccaatgatacgatggtttgtggagagcttgtcccgagcatggggctccactttatatcctccatgttttcccgaagagtcttttcgcccttacttacaaaaactgttagtgtcacttgtggacactccacagtggtgaaaccatttcctgagctcaggatccgtgtctgccaaccttgtaagtgcccctcttgggtggtaacttagtgcccagagaccccctgcccaagtccctctgtgtcgccagccatggtgttcctagatatgccatgtgttgcaactgtcttttgagccactctcatgatgggcttcttaattttaactttgtgtttcttaacttgtaacttctaataagtggtcctttataatttcctatattttaaatttagttctggcccagcacagtggctcacgcctgtaattcctgcactttgggaggccaaggcgggcagatcacctgaggtcaggagttcaagaccagcctggccaacatggtgaaaccctatctctactaaaaatacaacaaattagccgggcgtagtggcatgcccctctaatcccagctacttgagaggctgaggcaggagaatcacttaaacccgggaggcagaggttgcagtgagccgagatcgcaccactgcactccagcttgggtgacacagcaagactccgtctcaataaagaaacaaataaagttcttcattaattgtaaaattaacataaaatgaaacttttccacattcattgctgatgttattcatagaccagtgcttatcttctttttgttaaattataatatttcatagatttgtcactccctccattacacttggaagagcctgcacttcagtcttgatcaacaatttagctgaactgatgattcattatttctcccagagtttgctgtccaagcccacgtaaaacctcctggccccagtattcgccagaactacctgggagagcatcgtccgggagcaccacccacctcccatcctgggtcatgctccccgcttgttcttgtttcctcccgctaactgacgcaccctgttcaaggagcagaagttattcctctctttcctctacagccaagcaaatgcctcctgtttagctgaagcccaccaacatttggtttaaggacttatcattgatgaactaaagttacacagcaataggatatggaggaggaatgatagtgaggctacgtaatccccaaatttatccttcacccccagaattaaaaaaagaatgtaaatgcgtcctctgctattttacgacaggatctccaaacctgtgtagttttcatctgagcaggactgcccaccacaagccctgcacgtgctgtctgtagtcactaacccatcactcccgacctgcgccatctgccaacagttactggtctgccttgcgaccagcaatctcccatttccttgtctattcagaggcttaatatggtcttgaattttttttttcaatctgctatgtagctattggattttaaattgtattagactctggacctgtgccaggtgcttgctagagtttctgatgctatcttatatcatctttaggtggaagggggaaaacgccattcaactttcgtggtaataaaattattgcagttgtgccctccatctgttcactgaacttcctgtgggttttcaccagatcacatgactgacagcagagatggctttcaggcttttggtctgcttgttgcacccaagtctcaaccaccaaaccagacccttgctttgtctctgagctgggcgtccggatgtcccactgtggtaggttgactcactggagctgataaaaacattccagccaaacttgagagtctagcattacctctggctccaaaaatcaaaacaacaggattgctgtaagtagctttggattgagaccaagctacaagcttgagggatgagttttctctctttgttgagctgtgtcacaggacaagtatctcggaaagagaagcgtgaaagccaggggctcctcaccaaagtagcctgagcttgagataaccagtgccctgccctgtgccagccagttctagctgaattcctgccatgactatgagatccaagcccccgatccttcccaggcacctcctctgccttcccagagctttagtctaagtcctcaaagcacgttgacctgagagtcactagctagagcccaaaggggttcttagaagcccaagggagggaagatgtgggcagagaagagccagacggatgtcggagttaagagggcctggcgatacctgagcagccggggccctgggccaccaagagggtttgttggccatggcagagatgaagacactctcaagtgaagaagttggacttcccttagcctcacaggatggcatcattgttctctacaaagggacataaaggaaagagtgaccttttctaggttgttgatttgacattcagactgacatttcttggactcagtcctgacaaaatgtgtccccagtgtccttagtgctaaattaaaccttttgtctttcttttccttagtactttagacttctaagacatcttagagggagaagcacatatttttaagaattgctatttaagtctcaaaccatgctggctttctctatagggaggtagatggacaggtagattcggagagggggtcaaattaaattcagctcgggcctacccaggttgactgaataacattctcaaaattcttttatgatttatgcctagtgttcacccttttaaagtgttcccaggcactgcccttacaaacagctcccttcaggaaaaaggaagctccttaccatgtgcttccaggtgtttactctgtgtagccagtcctggagaacatgcataaataacaaacagagtgcgattaccctttctgaatcttttaggtgctggtgaaaagttacaggcaaacaaccctaaggaacaatctctctgctcccttgctcactgtgggagaggagctggcgctatggttcggggaatgcgcagtgctgtctgcatgttcaggttttccaataacggctgtgtgttcacgctgctctctctacccgctctttcagtccccccatgaccagtagtgcacacttgggagacagcagtttgggaacccagtctgtggaggggaccaggccttcactagccagcacggacgggggcagcgcctggaacctcagcccacttagctgggagctcccaggccacagagcagctcaacagcagcttcaagcttgtctttgttttcagcagttgggagccttagcctttaaaaatgtctattgtcaacctccaggacattcagataccatctccaatgcaaagtctgtctaagtagaaatcaacaaatgcttaacttcagggttgcagctgaacccaggcccaacccattcaaccctttcttcaagtgaaccctgcagagcctagaggcatggcagggaatacacctttagaccttactggtctaaacataaaaccacacctagtcagaattggaaggagctcaaaggtccttcatttttcacaaggctagaaaactgagtcctgagaaatgctatgacttgccccaaactgcccagcttgccacctgctgagccaagacagagccaaggcctcctgtccccagcctgggctcacctggtgatcaaccccatcactcacagtgaggaaacacggccacaaaaggttaagtgagttgttggttaggaggatattgaagaaacatctgaagctcattattattacttgaaagacatgaaaacctagtgtccacgttggccacagacattctaagggcacactcaggtcccttttgaccctggggaggctccagaggaaaggcctgagcttctttcagcttctggctctaccactcactgctgtggcctctttttcatgtgacttattcttttggggtcttggttttttaaatctctataatggagtgaataatacctgtgtcacaggatttttgtgcagattttacgtcattcgttcatttatttaattcctcattcagcaaacgtgccttaagatgtcagtgacatgccagatgctcataaggtccctgccttcttagaaccgatgtttgttctagttggggaaacaaatggtgcacaagtcaacaaataagagaagcaccaattgcactgagtgttgtgaaggcaataagccagtgagccgagagaggccacttttgttttttatagggtggtcattagtgaagcaggaagtgcctggtacatggcagctctagtcagagtcatttccactgagcttcctactgggctgtctgtgaacttcaagcagaaggcttcattcctggtcaaccacagcccccgcagccccgtgtggctcagggagttagctgccatgctggatgttgttgaacgtgctgcacgatcttacaggaagatggtaaacacctaggtcacatacattgcagaagttaccccttcatagatggtaaacccttcttagttaccccattagattgcaaaagcctaatgtcacatacactgtagaagttacccctctggactgggtgcggtggctcatgcctgtaatcctagcactttgggaggccgaggcaggcagatcacctgaggtcgggagttcaagaccatcctgaccaacatggagaaaccccgtctctactaaaaatacaaaaaaaaactagccgggcatggtggcacatgcctgtaatcccagctactagggaggccgaggcaggacaattgcttgaacccgggaggcggaggttgcagtgagccgagatcgcgccattgcactccagcctgggcaacaagagtgaaactccatcttaaaaaaaaaaaaaaaaaaaaaaaggaagttacctctctgtccaccttatcataaccataaacccactccagggccaatcttctcccctccagttgagcctgactctgagacagagaaagaaggcagttcttcagcacctgccttctcttactgaaacagctttgttctttaaaaatgttgatgaagatgagctcagtgcctttaagccatttgtcagcacttgtgtctggttttcatgcagggaggcttatttctattattaagagtcagttgccaagtgagaagtatccatttgggtgcataagagaaatgggcttgtaagagaaatgggctctgtaatcacatctaaagactagacttcgctatgaccaggccatagtaaacatcatagtatgtctagtctttaggtttgattacagaacattataagagcatcccttatacttgcatgtcattttaatgtcagtaataatagccaacattcattaagtacttactctgtggtgggtactataccaagcccttcacgtggcttatctcatccgattgtcagtacaactctgtgaagtaggaaggatggttacattccaagcctcagagtatagtaaaccttaagagcctgatctgagcaaggatgtgagactagtccaaggtcactcagctaataaggactggccttttagctcttgaaggctgggaccccatgtgtcctagtggctgtatttttagtcctgtgcttactatacactaggccctcagtaagtatttactgagtgaatgaatgggaaaagatgggactgaaactcaaattatctgcctgcctttggagttgctttttgtagttgtttcaaagatgaaatgagtaactatatgtaaattctttgaatatgcctgccatataataggtaatcaattgtattagctataaatgctaggtataatctcagaatttattatttttatggagaacttctatggaaataatgatcagcttgaagaataacttcataataaaatctacacgtcttctcttgacagataaagtttatactattttataccatttttgtgtactatcatatgctatatactggatgttcctgagattttgtttgcaacatttgaaagccatagttactaccagccaaagagtgtactttccgattagaggaaagatctctgttgctgagagatgtcctgtgcctttgtggagggtgagatgagttattgtttcaacatcaacttgaggcattttcacttctggttgtaccaggtggtgggaaggatagtcatgggggtgccaggtattttttccagatcctcttttgcaggatttaagggcagtctttgactcattactccttctagcggaatagtcatcagagtttccccaaagccatgagggcaggaaaacttactgctagcccataaacttagtagcagccttgcctaagtttctgtaattcagctggaaggaattcttctgagagcagtttacagtttattggttttatttcccattccaccctccttagagatgcggaaagcagccttgcataagctgcctcacagcctctcctaaggccttcatgggaaaacccccatgtaagtcactgaatggagaaaagctttcacatctttgagtcatttttatttctaacaatgagaagtgcgttttaacagcgacattaccacatcgaaatgtaagatgttattattccaatgaaaacaagccactgggggactctgcacacccacctagcccctctcttctccctgagtccgtgtgaggttttctaaagtttgaggccgtcctaagaactaggattttcgtctccattatcatggatgagtttcatttcttcttcacatagcaccacagtcctctcgtgattattgccctcatgtggttctttttttaaggaccagcagcgtgctgagctctgtacctcacacccagaagggtttcgtggagcctaagagaatcaaatttaaggataaagcattagggtggccagaactctgatgtcacttttcaaactaactttgcacacagtcagacccaggctttaaacctgactccactccagcaggctgcatgaccttgcaaccgagcacttagcctctctgagctccgagttaccttctcttcatggggttggcactggcctcagcgggacatttggtgactgaccaggatgccgtgggagcttcagacggcatgatgtatggggagcgcgggtcggtgggagctacttgttgcccccctcttgctacaaatgcagatttttcacagaaaagaacatcatcgtgttggtacctcttagacacctgattccatgacaaagacttccctctaagcacccacatacctgagaaccccatgtcgggctggaatcaacacagtgtatgaggaggctcccaaactctccaggccctaggataccgccccaccagcagttagggaacacccagagagcactgtgcagggcaggtggggtgcaaggggacttcaggagtggacgaggagggagtagaaagctgggggccttaggtgtcagctgagaggagggaaagaataaagaaagaaaaataaagctggggcctcattgaactctggctcatgtcagcaagtgctggaagtggtgccacatcctgagctgatcaaactttgtcagccagactgggccaaagagcccagctaaagaagttgtcccctccattgcagtcatgagcaacatcatcagcagacactgagacttccagcctgcgctgatgatggcaaagagctggaaggaaacactgatggtctgaaaaggcacaggtttcattgaactagaactagtagtttttgaaaaggggactgcagtgtgggggtgcagggtgtggggagatctaggcctaggtagtgctagagcttggcgtctatttatataacagtctggtagccacaaagtggggagctgctgatcactgaagccatagcagatgggggctgtgtgttgaagttacatcaatggccagaacaccctccgttttaggaattcttacacacttgttcaagatgtaactcttgccacaaagtctttgctgcttcactctgctcctctctgatcattctggaactctgaagatccagcacttagatgtttttagttggttttcttaaatttatttttcaaatttaattttttggtttaattatttttagagacaggatatcactcttaggcccaggctagagtggactggcatgattctagctcactgaagcctcgaactcctgggctcaagcaatcctcccatctcagcctcttgagtagctacagacatgcgccatcacatctggctaatttttaaattttttgtaaagatagggtcttgctaggttgctcaggctggtctttaactcctgggttcaagtgatcctcctgccttggcctctcacagtgctgggattacaggcgtgagctactatacctggtccagatgcttttagtcttaatcactgtaaatgttattttaaaattcttgttactgtgtgtgtctgtgtgtgttgtgtctgtgtgtctggtgtgtgtgtgtctgtatgtgcatgtctgtgtatgtctgtgtgtgtgtctgtgtgtgtgtgggtgtgtctgcatgtgagtgtgtgggtatctgttttgtatgtattgtgtgtgtatgtgtcttgtgtgttttgtctgtggtgtgtgtgtgtgtgcatgtctgtgttgtctgtatgtgcatgtctgggtgtgtgtgtattgtgtgtgtctggtgtgtgtgtgtgtgtgcgcgcgcatgtctgggtgtgttgtctgtgtctgtgtatatgttgtgggtatggatgtttgtgttgtgtttgtgttatgtgtgtgagtctgtggtgtgtgtgtctatgtgtgcgtgtctgtgtgttttatctgtgtgtgcgtgcctcggtgtgtctgtgtgtgtgtctatgtgagtggtgtgtatttggggatgtgggtgtgggtgtgtgtgtgtgtgtgcgcgcatgcagctcctctacctgctcctcccctttcctaaatatcttttaaatccacccagctagcatcatcctagttcaggcctgtttcccccttccctggactaggctcctgcctctgcctgctgcactgtgccctccagttctccccgctgtgatgggagcagccactgcacagtgccattctcatgccttagccttcaggcccttcagaggcttccgggaccttatgtgcagctccccagtctggcctctgctccccggtgtgtgctcttcccccaccccctccttagcctccagcctcacacccaggcctttcctgtgcggggccctccaggggagctcacctccccttcgtctggctgccacctcctcccttctggctccttgtccttccctgccttgctgccctgttattattggttttttgttgctgctgctgctgtttctgtctctctcctccatgaagatttaccttccatgagaacaggagctgggtttggctgccgcacccccgtatctctaggccctggcccacacagtgcctgcctggcacctgccagcagatagtcagtagaatgaagaatgagtgaatgaacaaatgaatggactcccataagaaggactaaattagataatacatacaaagcatctacagtgtgtctgggacatagttggccctcaatacttggttgattgcttcattgattcattcactcatcagtttattaagtgcctggctaatatccttggggatgcagcacctgacaaaacagataaaaacctctctgccctatgggccatgtcttccagtatagtataataagtgtggctgtggatgcatgtggggaagtgtgtggtttcctctctttcagccccctcttcctcagccttccaccgtcctcctcctcccaggaccctgtcccctctctccccacccaacctgggacaagggtcaccaagctgcagccactcctgccagcgacgccttggcaaaggagaggcccaggggccttgggtagactctagccactcctcaagctgctgaaagtggaatcacttcctctgccctggctggaataaataggccaggaataaaagtagaaaatcaaaagcccaaatcccagtgatgtgctaaaacgcaagtgctgccttaggccactgagctgcacgactccttacataacagaggactggagtttgcagaccagggcacctgcgatgtgtttgtagagccaggcctaggccttttcccagactccatgaggagcagcctcgggctccctctccgcaaagccaaagccattgctcctgcctccagggaggaagagactgaggccaagctatggccaagaaagctggccaccccagacccccgctcctccagagtagcccccctccaccggtggcacatgcctaccccttcaggtcagggctcaggattgtgaaggggaaggtcctcacctccagaatggtggaaccctgaggacagtgcctctcaaaagccagtccctagcattgcactctggggaatatcagcctgagccttgtctgcctcccaggcagggtccatgtctcagctaggatatttctcatcataccttaaccactgttggggtccctagcagggaactatcagccaaactgacattagccaaccaggacccattgtgttacttgctctctccatcggtaattcacattttctcaggagccatttgatagctgaaatattttaaagccccagagctttcatgccctgtgaccagttggcaggggtgggtgggctccccgcacaccacagcaccacctgcaaactctcaccacttttgcttgtgcatggaactgtgggattataaaatcatcttattttcattgcagaaatttccagaattgaaattcaaatatgtggaagaggagcagcccgaggagttttttatcccctatgtctggtctcttgtctacaactcagcagtcggcctgtactggaatccacaggacatccagctgttcaccatggattccgactgagggcaggatgctctcccacccggacccctccagccaagcagcccttcaagttcttttatttctgggtaacagaagtagacagacaggttacttggtgtatcttctgttaaagaggattgcacgagtgtgttttcctcacacactttgatttggagaattggtgctagttggcaatagataactcagcgtagatagtattgcaaaaaggggaggaaatacacaacaataataaatgtaaaaacctgctattcaacatgcagttttatttcgaagccaaaaatctagagctttcccaagatcctgttgccttaggcacatcacacttcaacagtgcacactatccaacagtgcacactattcaacagtgcacactattcaaaagcgtagactatttttttgcatgttcaagatatttgttttggtcttatgtgtgtgtgagagagagagattcctttgacattaaggagcatcaatgagaaaagatgatgaggcaggaattaataaagaaatgaagtcgtgtgtgtttggttgcctgtcagagggcacacaatttcataaacaccatgcctggacaatttgatattaatatttaacacctctgcatcttttcttaaaaaagaatatgggccagatacagtggctcacatttgtaatcccagcactttggggagccaagttagcagaatcccttgagcacaggaatctgaaaccagcttgggcaacatagtgagatcccatctctacaaaaaacttaaaaattagccaggcatgatggcacattcctgtagtcctagctactcaggaggctaaggtaggaggattgcctgagcccaggagttcaaggctgcagtgagctaagaacgtgccagtacactccagcctgagccacaaagtgagaccctgtctcgcaaaaaaaaaaaaagaaagaaaagaaaaagaaaatggctacttctcatgaagcccagattaacttttctgtgaatatggcctgtgaactgttgctggaattaaattggagtctagcacaaattaagttaatctactctgtattaatcattgggaaaaagaaaagcttcatttgaaaacagtctttttccttcacccacactaatagaaaaaggagagtaatttgttcatactgtattccacgtgggatgaaaagcatgttttgctctttgtttctgggccggtgtgatccgtgtgttggtgcctgagctggaggaaggagcttcttgcagggaaacagccactggggccacattgagggccagttgggaccttcctttccagtcacactctgtgtcctcacgggccccttcacagtctagataaggagcctagtttcattctcaaagaaaaagtatttggtcttcaacatagaaagcacaaaagcccagacgagactgagcacactgttcgaatccactgccagctcatctgtgtcagggctggcttctcctgtcctgtgtcccagggctgcaggcccgtgttatttgagtccatcaaatcttccgagggcctcggaggaaccattctcagtcaccccaagctctgtaaaaggtcaaaacactggcagcctctcagtgcaccactgtgtgggctccacacgggaaggcctggccaagctgtgctcttagaggctgtcgaggtagggcaggaagcttccctatcctcgtctggatggaatgaaacagaggttccctaaggccaagggactcgtggagcgcccatcccgggtggggtcccagaggtgagtgcagcttgcctcctgtccccaaggggcttgttctgtcaggcctcctccagtcactgctggagtggggactctgactcctgtgttcacctcagagcccatgtacaggctagaggtgaggcttggcaacaacttctactaatacttagctttgtggcagagccagtctgaaggaggagaagcgctctcagccagcagggggagtgatgattatcatttcaggtagcaaggatatgtatttactatgtggggaaataatttgcaactttaatttgtttccaaagcattttgattggcttccttttcctttaaaccaaaaaattgtttaaatgtttaagggtcatgtggaacagctgagcttctggcaggaccacagaactgtcctctgagtctgagggctgggcagtgccacaggacagtccctgggctgcaggactgtcagtgcttgttgtgtgaggaaatgaggcccttcaaaaacccagtcatcttgacagagggcacactcccaaggaaggcctgactggggaatcatacagcctctcctccaggcctctgggctcactgaggtgcccccagaaccctgattgccctcccctctttcccttttctcattcatcacacagtagaagcactcactagctaacagctcagctggggcagcagcctccatggaggcctgcaagtgatgctcccagtcctggttcccgctcaggagggaggccccaccacgtgcatcactgcctcagctctgcaaagtcaccagaggcttcttcctgatttttgtgaaagatttattatatggcaataaatctgaatgataaactttcattatacttgcattaattttgagtattagtttgcttagaaatttttacacgaagtaaaaatgtgtaatgatgcaacacaggatcatcgtgtgttcagatggaaattggcatctgattttaccccagatctgaagctgttactgcattgtgtcattttatcaacaaagacttctgccacaatatttacttttaaaagaatttgtccctttcaatagcatcttccctatcaagagttcaaggcactttgcagaagagcttcagatttctaactctagttcccacagtcacccgttgaggctggtgtcatacaatctatgaacaacaaccttgcagcaggactgccaccattcagcagtgcagacaacacagctcaaggacaaagacagagaaaggaaagaagagaaggtccctgaaggtgaagcatagaaagtacactgcacacacagttctctctggaaggaaagcacaggagctgggaagtagacgatagaaagtggaaaggacacaggaccagcatcagaacactcagcaacttcctaagagcttgctaaggtacatccaagagaaatatttagtgagggaaacttttaagcactggaattgttaatatatcatactttaagcaacatttcgtcctttagattccgggagccagggttttgcattgggtggtagagctctctgcataattgagtcaccctgtgcttttttgcagagccataaatttttggcacttgctgatacttcataggctggagtctctgcaaggtcaaccctttgggtctcttaattctttcctaggcactatcctgcaatatcagtagttgccacttgattttagggactgattattaggccttctgactccaaattcagaacaattccagtgtcctacatcacctcctggagtcaaagaggtcagtttctattcagtgatgaagagctaagctagctatgcatatgaagaactgagaagtagattataacacacaatccacagcaaataatgcatatttattttgtatgaattaaagcataaaatttaatctcattagcgtatagctattcagagttcccactcaaagcaagggagactcaccagtagccccaagacccttggccaggtcatactcaacccctaatctaacttcacaaggctgtctaaatgtcagctactcagacacagcctctggcattagcaaaatcccccagaggaaaagcagccccatagaactggacaagtaatacttaactatcttgttgactctggggtccttcaagcaaattttaaaaatatttttaccagatttccaagttgtccttagcttgagggttggtcctccattactgtcattggactatccctcatgggtagtgcagttcaacttctaaaccacctcagtacctgaatgtggtccgaggtgaaaccagattactgatgccttcaggtgcccaattgaagcaaatggcaaattctgtggaggaagtaaacataacccaaggcctcaaattatttctgcagtgttgcaatcagaaatacccaggtatgggagaagaccagacaacattaattacttgaattaaaaccattagaggaaaacacagacaatagaaatatccaaacagactccagataaagttgtcgcagaatttaaaacagctatggttactgtgttcaaaaaaatgagacgcatggtcaagaatttcaacagagagttagaaactgtaaaaggcgcattggaaattctataactaaagtactgtaatgagaagaacagtgaacaggtttaagagcagattagaaataactgaaaagagaatgagtaagatgaaaaattgagggtgaggggtgggagcaggaattatatagtaaaaaaaacagaacatggagaatagagggtaagagacttaaagggtacagtgagcatgtctgacctgctcagacatgcagggtagttggcatctcaaaagagtagaagaaaggaatatttaaacaaatggctgagaacttttccaaaactcatgaaagatatcacaccaaaaattcaagaatccctcccacaaactccaagtgggataaataaaaacaacccacacctagaaacatcatagtaaaactgttgaagaccaaagaaaaataatattttagacctgctggggtgggagagggaatataaccattaaaggagcaataatattagactgacagctccttctcagcagaaacaatggaagacagtgaaatactgccttttatggttctgaaagaaaatgactgccaacctaaaaatttctaatcagggaaaatatcctgcaaaaatgaagaggatatgaagacatttttagagaaacagctagaagaattaatcagcacgcctaccctaaaggaaaatttaaaaggtgttttacaggcagaaggaaaataatcccaaacgtaaggacagagccctaggaaagattgaagagcaatgaaaatgacacataaatattgactacataaaacaataattatgtcttatggagttttaaatatatagagaaataaaatgtatgaaaatgaaaggatttatgtgggaattttaagtgttctaagacacttggcatcatccaagaagagagtaaaaattcatttaatattagtctttgataactcatgtatgcatgataatatttgagatatcaataaaagtgtatagctttccacataataagagagaattcgaataatcaattcagtggaagatttaagaattgcaaaagagtctaagaaagaagaaaaagcagaacaggtggaacaaatagaaagcaagatatttgtgataaatccattattacactaaatgtaaatggactaatgctcaaatgttgacaaatattgtcagccttgttttaaaccatatgctatttacaagagacatttttagaacatgaatttagaaattttggaagaaaaagatggagaaatacatacccagcaaacagtaaccatgaggaaactggtgtagatatatttaagtaaactttaaggcaataatttttttaagaaataaaagggtcaattcaattactagaaagataatctaaatttatatgcacttaaaatataaactcaaaatatgtaaaagaaaatttgataggaaatttagacaaatatgcaaccagagtgatattttaacatgcctattttgttaattggtagaaaaactagcatacaaaaatcaagttataaaagatttaagcaatgaaatgagcaaaccaaacggatgtatgtaggacaccaaactcgataacatacttttcaaacacaaatggcacacactccaaaatactgggctataaaggtttcaacaggctaggcacagtggctcacatctgtaatactagcactttgagaggccaagtcaggaagatcacttgagcccaggagtttgagaccagcttgggcaacataatgaggccccacctttacaaaaaataaaaaaattaactgggcatggtggcatgtgcctatagccccagctacttgggaaggtgaggcaggagaatcacttgtgcccaggaggtcgaggctgcagtgagctataattgcactactgcactccagcttgggtgacagagcaagaccctgtctcagaaaaaaagtctcaacaaacctgaaaatacttcaaatgaaatatgttctctgaccataatagaatcaagactaattatttacaaaaagataattttataatcctcatatttttggaaatagatttccaggtaacccatctgtcagaatcttaatggaaatttgaaatattttgaactgatcatgaaaatactacatatcaaaacagagaaaaaacttgtgggatgcaaataaaactatgcttagaagaccttttaattttattttaaatttaaagagtacctgttcaggtttgttacaagaatatattgatgatgctgaggtttgggctcctaatgatcctgtcacccagatagtgaacatagtacccaatagaaagtttttcagcacttgcttccctctctccttcccttcctccctcgttttggagtccctagtgtctattgttcatatatatatatacacacacatatatatttaaatgtttatgttagaaaagaagaaaggttaaaaatcaattaagcaattacctcaaaaattttaaaaacagcacatgaaacccaaaaataagccaaattactgatatagaacacaaatatacaataaagggaatcaaagtcaaaagttggttatttaaaaggattaagaggactcattggctgggcatgttggctcacatgtgtaatcccagcactttgggagtcacctgaggtcaggagttcaagaccagcctggccaacatgatgaaaccccgtctctactaaaaatacaaaaattagctgggcgtggtggtgggcatctgtagtcccagctacgcaggaggctgaggcaagagaattgcttgaacctgggaggtggagggttcagtgggcagagattgtgccactgcactccagcctgggcaacagagcgagactccgtcccaaaataaataaataaaagaattcataaccccttaaaagactgatcaaagaaggaaggagaaagggcaggagagaggaatagccaatatcagaaaggaaaacaggtaagttacttcagattatgcagacatttaaaatatttaagagccagcctggataacatggtgaaaccctcctgtctctacacacacacacacacaaattagctgagcatggtggtgtgtgcctgtagtcccagctactggagaggctaaggtaggaggattacctgagcccaggaggtagaggctgcagtgagctgtggtcatggcaccacactccagcctgggcaatggagtgagagaccgtgtctcaaaaatatgtatacatatttaagagaatattatgaataccaataaattttaaatctagttgaaatgatctttattgcagtgataggtgtatacatatgtctaatcaaattgtacactttattacatatgtgcagttttatatattaagtatgcctcattaaagttgtttttagattttgcataaaatgaacaaattctttaaaaaaaaaaaaaaactctccaaaactgacatgaaacgatcctgaacattggaatcatcctatatctagcgcatacattgagtccataattacaatctgccacaggaaatttacagaccaagatggcttcagtagtgaatttaaccaaacatttaagagtgaaataatgccagttttagacagtctcccagaaaatagaaaaaccttctaatttgttttatgaaaacagcttaaccttagatataaagaatttgccaagaacaatacaagaaaggaaaattataggccagtcctcatggtatagatgcaaacagaaactagcaatctacaaaaacaatgtgtaaaaatacatcatgatcaaattggatttgtcattcacaaatcaattagagttattcaaagaatacagaaggaaaagtaaatgatctcaataaatgcaggggaaaatgtgataaaattcagcagtcaagtgctagaaatgtttagcgaactaggaaaaacggaagctatcttaatcttataaatattattttaaaactacagcaaacgcatcatacttaaaatatcaaaagctttcattctgagatcagaagcaaaaaaaaggatgtctattatcacttctattcaaaatgtcgctaggtgatgctatgcatgcctaagtatttagtggggagtgtactggtaccttaaattactttgaaatgcatcatgaaaagggaaaaaaggatggcttgatggatagatatatatgtgataaagcagatatagtaaacttggtaaaatctagaatggtagaatccagatggtgggtatacaaatgtacactgtacaatattcaattttgctatacgttgaggaaactatcacctgagttcctggcctagtatggcaagatttccttttaaattaattgggtagggtcagaagaaaatgaactatcattatttgtaaatgacatgattgaggatatagataatttaaagaattagccaataaactagtaaaattaacaaggcttctggacacaaggtcacagacaaaaataacgtgtatttctgatgctagcaataaacaattagacaatgaaattgcaaaggatatgaacagatacttctcaaaagaagacatttatgcagccaaagacacatgaaaaaatgctcatcatcactggccatcagagaaatgcaaatcaaaaccacaatgagataccatctcataccagttagaatggcgatcattaaaaagtcaggaaacaacaggtgctggagagggtgtggagaaataggaacacttttacactgttggtgggactgtaaactagttcaaccattgtggaagacagtgtggtgattcctcaaggatctagaactagaaataccatttgacccagccatcccattactgggtatatacccaaaggattataaatcatgctactataaagacacatgaacatgtatgtttattgtggcactattcacaatagcaaagacttggaaccaacccaaatgtccatcaatgatagactggattaagaaaatgtggcacatatacaccatggaatactatgcagccataaaaaaggatgagttcatgtcctttgtagggacatggatgaagctagaaaccatcattctgagcaaactatcccaaggacagaaaaccaaacaccacatgttctcactcataggtgggaattgaacaatgagaacacttggtcacagggtcaggaacatcacacactggggcctgtcgtggggtggggggaggggggagggatagcattaggagatatacctaatgtaaatgatgagttaacgggtgcagcacaccaacatgtcacatgtatacatatgtaacaaatctgcacgttgtgcacatgtaccctagaacttaaagtataataaaaaaataaataataaaacaaatactcagagatcaatctaaaataaagtgtgattgaaactaaagatctaaataagggttccctaaataagggaccactccagggtcattagattcataagttggaaggctcgatatctcagaattgatctacggattcaatgcaatctcaatccaaatcccagtattttgggggaatgggaaaacttgacaaattggttttgcctaaaatctacatggaaatgcaaaacgcctagaattgcacagaaaaccttgaaaaagaataaagcccatacttacattgctagatgtctacaacttacagatgtactctaattaaaacctataggccaggtgcagtggctcacacctataatcccagcacttgagaggctgaggtgggaggattgcttgagaccagcctgggcaacatggtgaaactctgtctctacagaaaattttaaaaattagccaagtgtggtggtgcacacctgtagtcccagcagctggagaggctgaggcagaaggattgcttgagcccagaggcagaggtttcagtgagctgagactgcaccactggactccaacctaggtgacagagcgaaatcctatctcaaaacgaaaacaaagacttacaaatttactctaagtttagtattgttataagggtagacaaaacatattgatgaaatagaacttaaaggtccacatatataaggacaattgatttgacaaaagggacactgctgggtaatggggaaatgatttttttccccaataaatggcgttggcacagtgaagggaaaatgaatcttgacccctacttcactctgtctgcaaaatcagttcccaggggactatagagctaaatgtgaaatgttaaaccataatattctagaagaaagcataggagactatcttcatgtcctttagatagaaaacaaaaaataccagccataaagaaaaggtcagataaatcagattacggtcaaattaggaacttctgtttaacaagagacatcaataagagagtgagaaggtaagctacagagtgaaagcagatctttgtaatgtatagaaccacaaaggagtcaaataaagactatataaaggattcaatgaggaaaaataaaattggcaaaagacaggcatttctcaaaaatgttttcagttcaccaataacatagaaaagtgctgaaatcaaggaaaaattcaaattgaacccacaatgagataccccctactcactcaccagaatggctaagttaaaaaggtcaacaacatcaagtgtttgtgaggatgtggaagaacaggaaatctgataccctacatgtagtccatgtaggactataaattgatagcactttgaaaaactgtttagtaatatctaccaaagttgaagatactcatcccctaagacctagcaacaggttcaagactgttgatagtgcaattattcataatacctaaaaactggaaacaccaggaatatcaacagtagaacgtgtaaataaatagcaatatatctatgcaatgtaatactatacagcagtgaaaaataaataaccagctgcattcagttacacagatgaaactcaaatattatagcatctaaaagaagactgatacaaaagaatacatactgtatgagctcatttacatacagaaaacaaggccaaaataaacctatagtttggggatgtacacttaagtagtaaaactttgaagaaggacaagtacatgcctaatgtgaaagccaggatacgggttacttttgggaaaacagaagcgaccgtgattgggagaggcataggagggactcgggaagctggcagcgttctatttcctcatggccagtggtcatgtaagtgtttcattggcaataaatcagtgaactgttcattttcatcttatgtattttctgtatgtttattagattttacaattaaaactgttaaagctaatctaaagctaatttgcattttaaacaagactgatagaaatttaccacagaataagttagtcatttctcttaaatgtttcctcacccactaaattctagatgggtcttgctagaggaacagtattgtaactagtcctaaaacaatgaatgaaacagagaagatctggcttctgggaggttgagttggttgtttttcttaagttctcaagctttcctcttggatattcgattactgttaaatgaatttctaccgactgatgcatggagcccagtgaaatggctgttcattgaaatgaatgccaaaatcgcccctccccacagacacttactgacaccccacagtaggtgtcagtaagccctgatgagcccagtctctacccccagcccctttcccccgctcagtgctgtcgggcctcacacctgagcatgagcagggcgaccctccgcacccagccaggaacactgcctgccatgagaagggccccctccccctaagcatggggattcctggtctgtgttcttaccacttcctgaggcagaggaggggcctccaacccaagacggaatttctctacacgtgtggcagctgctgtctgggctttgggcccccagctctgagccaaggccatggagagacacttaaatgtaaagccctcgtggccaccctgggctttggggaagcaactccactcttcaccctactctggcattcactggccgcgtggccttggcaagtcccccacacttcctgacgtcaccgtcttccttgtgaaacgggacgtttacatgagacactgtgtaagggggtgacatcctcatgacattacagttcacgtttccatcttctcacatgcctgtactcatctgggccccggccccacccgtgatagaggaaagacagagaaagaggctgagaagtcacaccgcacctcagatctcatcattctcccacaccccaccactgtcctcaaaatccttatttttttggaacatcgagaagcc

SEQ ID NO: 831 - DNA, 2204 bp, Homo sapiens
ccacatcttcatttggcagacacacaatgctttgtttattatttgctgtttgctgaaagtgttcatctgtcagatgtcagaggaggaattacaacttcattttacttatgaagaaaaatctcctggcaattacagttctgactcagaagatcttttggaagaattgctgtgctgtttgatgcagttgatcactgatattccactcttatattacatatgaaatatcagtagaagctatatcaacaatggttgttttcctttcctgccaactcttccacaaagaagttttgcgacagagcatcagccacaagtatttgatgcgaggtccatgtcttccatacaccagcaaacttgtgaagaccttattatataactttatcagacaagaaaagccacctcctccaggggcccatgttttccctcagcagtcggatgggggaggactgctttatggacttgcatcaggagtagcaacaggactctggactgtcttcacactaggtggtgtgggcagcaaagcggctgcctctccagagctttcttcccctctggccaaccagagtctcctgcttctgctggtgttggccaatctgacagatgcctcagatgcgccaaacccctacagacaagccattatgtccttcaagaacacacaagatagcagtcctttcccctcatcaattccacatgccttccagatcaactttaatagtttgtacacagctctttgtgaacagcagacatctgatcaagcaactctcctcttgtataccttgctccatcaaaatagtaatattagaacatacatgttggctcgcacagatatggaaaatcttgttttaccaattcttgagattctgtatcatgttgaagaaaggaattcacaccatgtgtatatggcccttataatattgttgatccttacggaagatgatggcttcaacagatccattcatgaagtgatactaaaaaatattacttggtattcagaacgagttttaactgaaatctccttggggagtctcctgatcctggtggtaataagaaccattcaatacaacatgactaggacacgagacaagtaccttcacacaaattgtttggcagctttagcaaatatgtcggcacagtttcgttctctccatcagtatgctgcccagaggatcatcagtttattttctttgctgtctaaaaaacacaacaaagttctggaacaagccacacagtccttgagaggttcgctgagttctaatgatgttcctctaccagattatgcacaagacctaaatgtcattgaagaagtgattcgaatgatgttagagatcatcaactcctgcctgacaaattcccttcaccacaacccaaacttggtatacgccctgctttacaaacgcgatctctttgaacaatttcgaactcatccttcatttcaggatataatgcaaaatattgatctggtgagtgtaaatgaagacatttattatgattcttttttaagtattaaagcagagaatgtttaataagccttggtaagaactataatagtaagagtttcttctttcaacattaactgtatttgcagtctattttactataatagttgtggtaatctgtgtgtgtgttgtatatacacacacatacatatttaatacaattgaagtcatacttcatacagttttttattctgacttttttactttacacttagaccatgagcatttttctgtggtattatcaattctttgaaagtctcacattttaatttctatctagcccatgtttgtgtcctaaaatatatataactattatcccatttttgctcatttatttccagtattttatatcaattcataatgaatgaaaagtttataaataagtcttatctcaaattttaaaattatatttttgatatggttttaaagctggaattttactagtttttactgtcaaaagatatctttattttcaagattcaacacaggttgccaaattgctttccagaaaaactgtagaatttatgcctgtgggccgggtgtggtggctgatgcctataatcccagctacttgagaggctgaggcaggagaatcgcttgaacccaggaaatagaggttgcagtgagccgagatcacaccattgtactctggcctgagcaacgagagtaaaactccgtctcacacacaaaaaaaaaaaaaaaaaaaaaaaa

SEQ ID NO: 832 - protein, 416 aa, Homo sapiens
MVVFLSCQLFHKEVLRQSISHKYLMRGPCLPYTSKLVKTLLYNFIRQEKPPPPGAHVFPQQSDGGGLLYGLASGVATGLWTVFTLGGVGSKAADELSSPLANQSLLLLLVLANLTDASDAPNPYRQAIMSFKNTQDSSPFPSSIPHAFQINFNSLYTALCEQQTSDQATLLLYTLLHQNSNIRTYMLARTDMENLVLPIILYHVEERNSHHVYMALIILLILTEDDGFNRSIHEVILKNITWYSVLTEISLGSLLILVVIRTIQYNMTRTRDKYLHTNCLAANMSAQFRSLHQYAAQRIISLFSLLSKKHNKVLEQATQSLRGSLSSNDVPLPDYAQDLNVIEEVIRMMLEIINSCLTNSLHHNPNLVYALLYKRDLFEQFRTHPSFQDIMQNIDLVSVNEDIYYDSFLSIKAENV

SEQ ID NO: 833 - DNA, 4989 bp, Homo sapiens
ggaggcacgaataacacccaaaggactacagtttccagaagcccgcgcgcgccgcgtgccacgtgaccacctggctggcgcgcgcgcctgggggtctggtccctagccgcgttctcggtcgcttccctcttctctcgccgcctcctggcctccgcaccgacgcggcccgggctggagccgagccggggccgagctgcaggccggaccggagccggatctgtacccgctgagacgtggaaacatggaggcctgagccggtgtgcgccacctgggctgcggcggcgacagcgacttctcctgacccctctgccaccctcccatccgtccgcgggtccgtggagctggagcagatcccccagccggctgagacaggttgtcttttggaaatgcaggtttaaggacaaattatctgcttaagctagaagatgggatcgaatagcagcagaatcggcgatcttcctaaaaatgagtacttgaaaaagttatcaggcacggaatctatctctgagaatgacccgttctggaatcagcttctctcattttctttccctgcaccaactagcagtagtgagttgaaactcttggaggaagcaaccatttcagtctgcaggtcattagttgaaaacaatcctcgaacaggaaatcttggtgcactaattaaggtcttcctttctagaaccaaagaactaaaactttcagcagaatgtcagaaccacatcttcatttggcagacacacaatgctttgtttattatttgctgtttgctgaaagtgttcatctgtcagatgtcagaggaggaattacaacttcattttacttatgaagaaaaatctcctggcaattacagttctgactcagaagatcttttggaagaattgctgtgctgtttgatgcagttgatcactgatattccactcttagatattacatatgaaatatcagtagaagctatatcaacaatggttgttttcctttcctgccaactcttccacaaagaagttttgcgacagagcatcagccacaagtatttgatgcgaggtccatgtcttccatacaccagcaaacttgtgaagaccttattatataactttatcagacaagaaaagccacctcctccaggggcccatgttttccctcagcagtcggatgggggaggactgctttatggacttgcatcaggagtagcaagactctggactgtcttcacactaggtggtgtgggcagcaaagcggctgcctctccagagctttcttcccctctggccaaccagagtctcctgcttctgctggtgttggccaatctgacagatgcctcagatgcgccaaacccctacagacaagccattatgtccttcaagaacacacaagatagcagtcctttcccctcatcaattccacatgccttccagatcaactttaatagtttgtacacagctctttgtgaacagcagacatctgatcaagcaactctcctcttgtataccttgctccatcaaaatagtaatattagaacatacatgttggctcgcacagatatggaaaatcttgttttaccaattcttgagattctgtatcatgttgaagaaaggaattcacaccatgtgtatatggcccttataatattgttgatccttacggaagatgatggcttcaacagatccattcatgaagtgatactaaaaaatattacttggtattcagaacgagttttaactgaaatctccttggggagtctcctgatcctggtggtaataagaaccattcaatacaacatgactaggacacgagacaagtaccttcacacaaattgtttggcagctttagcaaatatgtcggcacagtttcgttctctccatcagtatgctgcccagaggatcatcagtttattttctttgctgtctaaaaaacacaacaaagttctggaacaagccacacagtccttgagaggttcgctgagttctaatgatgttcctctaccagattatgcacaagacctaaatgtcattgaagaagtgattcgaatgatgttagagatcatcaactcctgcctgacaaattcccttcaccacaacccaaacttggtatacgccctgctttacaaacgcgatctctttgaacaatttcgaactcatccttcatttcaggatataatgcaaaatattgatctggtgatctccttctttagctcaaggttgctgcaagctggagctgagctgtcagtggaacgggtcctggaaatcattaagcaaggcgtcgttgcgctgcccaaagacagactgaagaaatttccagaattgaaattcaaatatgtggaagaggagcagcccgaggagttttttatcccctatgtctggtctcttgtctacaactcagcagtcggcctgtactggaatccacaggacatccagctgttcaccatggattccgactgagggcaggatgctctcccacccggacccctccagccaagcagcccttcaagttcttttatttctgggtaacagaagtagacagacaggttacttggtgtatcttctgttaaagaggattgcacgagtgtgttttcctcacacactttgatttggagaattggtgctagttggcaatagataactcagcgtagatagtattgcaaaaaggggaggaaatacacaacaataataaatgtaaaaacctgctattcaacatgcagttttatttcgaagccaaaaatctagagctttcccaagatcctgttgccttaggcacatcacacttcaacagtgcacactatccaacagtgcacactattcaacagtgcacactattcaaaagcgtagactatttttttgcatgttcaagatatttgttttggtcttatgtgtgtgtgagagagagagattcctttgacattaaggagcatcaatgagaaaagatgatgaggcaggaattaataaagaaatgaagtcgtgtgtgtttggttgcctgtcagagggcacacaatttcataaacaccatgcctggacaatttgatattaatatttaacacctctgcatcttttcttaaaaaagaatatgggccagatacagtggctcacatttgtaatcccagcactttggggagccaagttagcagaatcccttgagcacaggaatctgaaaccagcttgggcaacatagtgagatcccatctctacaaaaaacttaaaaattagccaggcatgatggcacattcctgtagtcctagctactcaggaggctaaggtaggaggattgcctgagcccaggagttcaaggctgcagtgagctaagaacgtgccagtacactccagcctgagccacaaagtgagaccctgtctcgcaaaaaaaaaaaaagaaagaaaagaaaaagaaaatggctacttctcatgaagcccagattaacttttctgtgaatatggcctgtgaactgttgctggaattaaattggagtctagcacaaattaagttaatctactctgtattaatcattgggaaaaagaaaagcttcatttgaaaacagtctttttccttcacccacactaatagaaaaaggagagtaatttgttcatactgtattccacgtgggatgaaaagcatgttttgctctttgtttctgggccggtgtgatccgtgtgttggtgcctgagctggaggaaggagcttcttgcagggaaacagccactggggccacattgagggccagttgggaccttcctttccagtcacactctgtgtcctcacgggccccttcacagtctagataaggagcctagtttcattctcaaagaaaaagtatttggtcttcaacatagaaagcacaaaagcccagacgagactgagcacactgttcgaatccactgccagctcatctgtgtcagggctggcttctcctgtcctgtgtcccagggctgcaggcccgtgttatttgagtccatcaaatcttccgagggcctcggaggaaccattctcagtcaccccaagctctgtaaaaggtcaaaacactggcagcctctcagtgcaccactgtgtgggctccacacgggaaggcctggccaagctgtgctcttagaggctgtcgaggtagggcaggaagcttccctatcctcgtctggatggaatgaaacagaggttccctaaggccaagggactcgtggagcgcccatcccgggtggggtcccagaggtgagtgcagcttgcctcctgtccccaaggggcttgttctgtcaggcctcctccagtcactgctggagtggggactctgactcctgtgttcacctcagagcccatgtacaggctagaggtgaggcttggcaacaacttctactaatacttagctttgtggcagagccagtctgaaggaggagaagcgctctcagccagcagggggagtgatgattatcatttcaggtagcaaggatatgtatttactatgtggggaaataatttgcaactttaatttgtttccaaagcattttgattggcttccttttcctttaaaccaaaaaattgtttaaatgtttaagggtcatgtggaacagctgagcttctggcaggaccacagaactgtcctctgagtctgagggctgggcagtgccacaggacagtccctgggctgcaggactgtcagtgcttgttgtgtgaggaaatgaggcccttcaaaaacccagtcatcttgacagagggcacactcccaaggaaggcctgactggggaatcatacagcctctcctccaggcctctgggctcactgaggtgcccccagaaccctgattgccctcccctctttcccttttctcattcatcacacagtagaagcactcactagctaacagctcagctggggcagcagcctccatggaggcctgcaagtgatgctcccagtcctggttcccgctcaggagggaggccccaccacgtgcatcactgcctcagctctgcaaagtcaccagaggcttcttcctgatttttgtgaaagatttattatatggca

SEQ ID NO: 834 - protein, 656 aa, Homo sapiens
MGSNSSRIGDLPKNEYLKKLSGTESISENDPFWNQLLSFSFPAPTSSSELKLLEEATISVCRSLVENNPRTGNLGALIKVFLSRTKELKLSAECQNHIFIWQTHNALFIICCLLKVFICQMSEEELQLHFTYEEKSPGNYSSDSEDLLEELLCCLMQLITDIPLLDITYEISVEAISTMVVFLSCQLFHKEVLRQSISHKYLMRGPCLPYTSKLVKTLLYNFIRQEKPPPPGAHVFPQQSDGGGLLYGLASGVARLWTVFTLGGVGSKAADELSSPLANQSLLLLLVLANLTDASDAPNPYRQAIMSFKNTQDSSPFPSSIPHAFQINFNSLYTALCEQQTSDQATLLLYTLLHQNSNIRTYMLARTDMENLVLPIILYHVEERNSHHVYMALIILLILTEDDGFNRSIHEVILKNITWYSVLTEISLGSLLILVVIRTIQYNMTRTRDKYLHTNCLAANMSAQFRSLHQYAAQRIISLFSLLSKKHNKVLEQATQSLRGSLSSNDVPLPDYAQDLNVIEEVIRMMLEIINSCLTNSLHHNPNLVYALLYKRDLFEQFRTHPSFQDIMQNIDLVISFFSSRLLQAGAELSVERVLEIIKQGVVPKDRLKKFPELKFKYVEEEQPEEFFIPYVWSLVYNSAVGWNPQDIQLFTMDSD

SEQ ID NO: 835 - DNA, 5736 bp, Homo sapiens
ggaggcacgaataacacccaaaggactacagtttccagaagcccgcgcgcgccgcgtgccacgtgaccacctggctggcgcgcgcgcctgggggtctggtccctagccgcgttctcggtcgcttccctcttctctcgccgcctcctggcctccgcaccgacgcggcccgggctggagccgagccggggccgagctgcaggccggaccggagccggatctgtacccgctgagacgtggaaacatggaggcctgagccggtgtgcgccacctgggctgcggcggcgacagcgacttctcctgacccctctgccaccctcccatccgtccgcgggtccgtggagctggagcagatcccccagccggctgagacaggttgtcttttggaaatgcaggtttaaggacaaattatctgcttaagctagaagatgggatcgaatagcagcagaatcggcgatcttcctaaaaatgagtacttgaaaaagttatcaggcacggaatctatctctgagaatgacccgttctggaatcagcttctctcattttctttccctgcaccaactagcagtgagttgaaactcttggaggaagcaaccatttcagtctgcaggtcattagttgaaaacaatcctcgaacaggaaatcttggtgcactaattaaggtcttcctttctagaaccaaagaactaaaactttcagcagaatgtcagaaccacatcttcatttggcagacacacaatgctttgtttattatttgctgtttgctgaaagtgttcatctgtcagatgtcagaggaggaattacaacttcattttacttatgaagaaaaatctcctggcaattacagttctgactcagaagatcttttggaagaattgctgtgctgtttgatgcagttgatcactgatattccactcttagatattacatatgaaatatcagtagaagctatatcaacaatggttgttttcctttcctgccaactcttccacaaagaagttttgcgacagagcatcagccacaagtatttgatgcgaggtccatgtcttccatacaccagcaaacttgtgaagaccttattatataactttatcagacaagaaaagccacctcctccaggggcccatgttttccctcagcagtcggatgggggaggactgctttatggacttgcatcaggagtagcaacaggactctggactgtcttcacactaggtggtgtgggcagcaaagcggctgcctctccagagctttcttcccctctggccaaccagagtctcctgcttctgctggtgttggccaatctgacagatgcctcagatgcgccaaacccctacagacaagccattatgtccttcaagaacacacaagatagcagtcctttcccctcatcaattccacatgccttccagatcaactttaatagtttgtacacagctctttgtgaacagcagacatctgatcaagcaactctcctcttgtataccttgctccatcaaaatagtaatattagaacatacatgttggctcgcacagatatggaaaatcttgttttaccaattcttgagattctgtatcatgttgaagaaaggaattcacaccatgtgtatatggcccttataatattgttgatccttacggaagatgatggcttcaacagatccattcatgaagtgatactaaaaaatattacttggtattcagaacgagttttaactgaaatctccttggggagtctcctgatcctggtggtaataagaaccattcaatacaacatgactaggacacgagacaagtaccttcacacaaattgtttggcagctttagcaaatatgtcggcacagtttcgttctctccatcagtatgctgcccagaggatcatcagtttattttctttgctgtctaaaaaacacaacaaagttctggaacaagccacacagtccttgagaggttcgctgagttctaatgatgttcctctaccagattatgcacaagacctaaatgtcattgaagaagtgattcgaatgatgttagagatcatcaactcctgcctgacaaattcccttcaccacaacccaaacttggtatacgccctgctttacaaacgcgatctctttgaacaatttcgaactcatccttcatttcaggatataatgcaaaatattgatctggtgagtgtaaatgaagacatttattatgattcttttttaagtattaaagcagagaatgtttaataagccttggtaagaactataatagtaagagtttcttctttcaacattaactgtatttgcagtctattttactataatagttgtggtaatctgtgtgtgtgttgtatatacacacacatacatatttaatacaattgaagtcatacttcatacagttttttattctgacttttttactttacacttagaccatgagcatttttctgtggtattatcaattctttgaaagtctcacattttaatttctatctagcccatgtttgtgtcctaaaatatatataactattatcccatttttgctcatttatttccagtattttatatcaattcataatgaatgaaaagtttataaataagtcttatctcaaattttaaaattatatttttgatatggttttaaagctggaattttactagtttttactgtcaaaagatatctttattttcaagattcaacacaggttgccaaattgctttccagaaaaactgtagaatttatgcctgtgggccgggtgtggtggctgatgcctataatcccagctacttgagaggctgaggcaggagaatcgcttgaacccaggaaatagaggttgcagtgagccgagatcacaccattgtactctggcctgagcaacgagagtaaaactccgtctcacacacaaaaaaaaaaaaaaaaaaaaaaaagtgatctccttctttagctcaaggttgctgcaagctggagctgagctgtcagtggaacgggtcctggaaatcattaagcaaggcgtcgttgcgctgcccaaagacagactgaagaaatttccagaattgaaattcaaatatgtggaagaggagcagcccgaggagttttttatcccctatgtctggtctcttgtctacaactcagcagtcggcctgtactggaatccacaggacatccagctgttcaccatggattccgactgagggcaggatgctctcccacccggacccctccagccaagcagcccttcaagttcttttatttctgggtaacagaagtagacagacaggttacttggtgtatcttctgttaaagaggattgcacgagtgtgttttcctcacacactttgatttggagaattggtgctagttggcaatagataactcagcgtagatagtattgcaaaaaggggaggaaatacacaacaataataaatgtaaaaacctgctattcaacatgcagttttatttcgaagccaaaaatctagagctttcccaagatcctgttgccttaggcacatcacacttcaacagtgcacactatccaacagtgcacactattcaacagtgcacactattcaaaagcgtagactatttttttgcatgttcaagatatttgttttggtcttatgtgtgtgtgagagagagagattcctttgacattaaggagcatcaatgagaaaagatgatgaggcaggaattaataaagaaatgaagtcgtgtgtgtttggttgcctgtcagagggcacacaatttcataaacaccatgcctggacaatttgatattaatatttaacacctctgcatcttttcttaaaaaagaatatgggccagatacagtggctcacatttgtaatcccagcactttggggagccaagttagcagaatcccttgagcacaggaatctgaaaccagcttgggcaacatagtgagatcccatctctacaaaaaacttaaaaattagccaggcatgatggcacattcctgtagtcctagctactcaggaggctaaggtaggaggattgcctgagcccaggagttcaaggctgcagtgagctaagaacgtgccagtacactccagcctgagccacaaagtgagaccctgtctcgcaaaaaaaaaaaaagaaagaaaagaaaaagaaaatggctacttctcatgaagcccagattaacttttctgtgaatatggcctgtgaactgttgctggaattaaattggagtctagcacaaattaagttaatctactctgtattaatcattgggaaaaagaaaagcttcatttgaaaacagtctttttccttcacccacactaatagaaaaaggagagtaatttgttcatactgtattccacgtgggatgaaaagcatgttttgctctttgtttctgggccggtgtgatccgtgtgttggtgcctgagctggaggaaggagcttcttgcagggaaacagccactggggccacattgagggccagttgggaccttcctttccagtcacactctgtgtcctcacgggccccttcacagtctagataaggagcctagtttcattctcaaagaaaaagtatttggtcttcaacatagaaagcacaaaagcccagacgagactgagcacactgttcgaatccactgccagctcatctgtgtcagggctggcttctcctgtcctgtgtcccagggctgcaggcccgtgttatttgagtccatcaaatcttccgagggcctcggaggaaccattctcagtcaccccaagctctgtaaaaggtcaaaacactggcagcctctcagtgcaccactgtgtgggctccacacgggaaggcctggccaagctgtgctcttagaggctgtcgaggtagggcaggaagcttccctatcctcgtctggatggaatgaaacagaggttccctaaggccaagggactcgtggagcgcccatcccgggtggggtcccagaggtgagtgcagcttgcctcctgtccccaaggggcttgttctgtcaggcctcctccagtcactgctggagtggggactctgactcctgtgttcacctcagagcccatgtacaggctagaggtgaggcttggcaacaacttctactaatacttagctttgtggcagagccagtctgaaggaggagaagcgctctcagccagcagggggagtgatgattatcatttcaggtagcaaggatatgtatttactatgtggggaaataatttgcaactttaatttgtttccaaagcattttgattggcttccttttcctttaaaccaaaaaattgtttaaatgtttaagggtcatgtggaacagctgagcttctggcaggaccacagaactgtcctctgagtctgagggctgggcagtgccacaggacagtccctgggctgcaggactgtcagtgcttgttgtgtgaggaaatgaggcccttcaaaaacccagtcatcttgacagagggcacactcccaaggaaggcctgactggggaatcatacagcctctcctccaggcctctgggctcactgaggtgcccccagaaccctgattgccctcccctctttcccttttctcattcatcacacagtagaagcactcactagctaacagctcagctggggcagcagcctccatggaggcctgcaagtgatgctcccagtcctggttcccgctcaggagggaggccccaccacgtgcatcactgcctcagctctgcaaagtcaccagaggcttcttcctgatttttgtgaaagatttattatatggca

SEQ ID NO: 836 - protein, 593 aa, Homo sapiens
MGSNSSRIGDLPKNEYLKKLSGTESISENDPFWNQLLSFSFPAPTSSELKLLEEATISVCRSLVENNPRTGNLGALIKVFLSRTKELKLSAECQNHIFIWQTHNALFIICCLLKVFICQMSEEELQLHFTYEEKSPGNYSSDSEDLLEELLCCLMQLITDIPLLDITYEISVEAISTMVVFLSCQLFHKEVLRQSISHKYLMRGPCLPYTSKLVKTLLYNFIRQEKPPPPGAHVFPQQSDGGGLLYGLASGVATGLWTVFTLGGVGSKAADELSSPLANQSLLLLLVLANLTDASDAPNPYRQAIMSFKNTQDSSPFPSSIPHAFQINFNSLYTALCEQQTSDQATLLLYTLLHQNSNIRTYMLARTDMENLVLPIILYHVEERNSHHVYMALIILLILTEDDGFNRSIHEVILKNITWYSVLTEISLGSLLILVVIRTIQYNMTRTRDKYLHTNCLAANMSAQFRSLHQYAAQRIISLFSLLSKKHNKVLEQATQSLRGSLSSNDVPLPDYAQDLNVIEEVIRMMLEIINSCLTNSLHHNPNLVYALLYKRDLFEQFRTHPSFQDIMQNIDLVSVNEDIYYDSFLSIKAENV

SEQ ID NO: 837 - DNA, 4989 bp, Homo sapiens
ggaggcacgaataacacccaaaggactacagtttccagaagcccgcgcgcgccgcgtgccacgtgaccacctggctggcgcgcgcgcctgggggtctggtccctagccgcgttctcggtcgcttccctcttctctcgccgcctcctggcctccgcaccgacgcggcccgggctggagccgagccggggccgagctgcaggccggaccggagccggatctgtacccgctgagacgtggaaacatggaggcctgagccggtgtgcgccacctgggctgcggcggcgacagcgacttctcctgacccctctgccaccctcccatccgtccgcgggtccgtggagctggagcagatcccccagccggctgagacaggttgtcttttggaaatgcaggtttaaggacaaattatctgcttaagctagaagatgggatcgaatagcagcagaatcggcgatcttcctaaaaatgagtacttgaaaaagttatcaggcacggaatctatctctgagaatgacccgttctggaatcagcttctctcattttctttccctgcaccaactagcagtgagttgaaactcttggaggaagcaaccatttcagtctgcaggtcattagttgaaaacaatcctcgaacaggaaatcttggtgcactaattaaggtcttcctttctagaaccaaagaactaaaactttcagcagaatgtcagaaccacatcttcatttggcagacacacaatgctttgtttattatttgctgtttgctgaaagtgttcatctgtcagatgtcagaggaggaattacaacttcattttacttatgaagaaaaatctcctggcaattacagttctgactcagaagatcttttggaagaattgctgtgctgtttgatgcagttgatcactgatattccactcttagatattacatatgaaatatcagtagaagctatatcaacaatggttgttttcctttcctgccaactcttccacaaagaagttttgcgacagagcatcagccacaagtatttgatgcgaggtccatgtcttccatacaccagcaaacttgtgaagaccttattatataactttatcagacaagaaaagccacctcctccaggggcccatgttttccctcagcagtcggatgggggaggactgctttatggacttgcatcaggagtagcaacaggactctggactgtcttcacactaggtggtgtgggcagcaaagcggctgcctctccagagctttcttcccctctggccaaccagagtctcctgcttctgctggtgttggccaatctgacagatgcctcagatgcgccaaacccctacagacaagccattatgtccttcaagaacacacaagatagcagtcctttcccctcatcaattccacatgccttccagatcaactttaatagtttgtacacagctctttgtgaacagcagacatctgatcaagcaactctcctcttgtataccttgctccatcaaaatagtaatattagaacatacatgttggctcgcacagatatggaaaatcttgttttaccaattcttgagattctgtatcatgttgaagaaaggaattcacaccatgtgtatatggcccttataatattgttgatccttacggaagatgatggcttcaacagatccattcatgaagtgatactaaaaaatattacttggtattcagaacgagttttaactgaaatctccttggggagtctcctgatcctggtggtaataagaaccattcaatacaacatgactaggacacgagacaagtaccttcacacaaattgtttggcagctttagcaaatatgtcggcacagtttcgttctctccatcagtatgctgcccagaggatcatcagtttattttctttgctgtctaaaaaacacaacaaagttctggaacaagccacacagtccttgagaggttcgctgagttctaatgatgttcctctaccagattatgcacaagacctaaatgtcattgaagaagtgattcgaatgatgttagagatcatcaactcctgcctgacaaattcccttcaccacaacccaaacttggtatacgccctgctttacaaacgcgatctctttgaacaatttcgaactcatccttcatttcaggatataatgcaaaatattgatctggtgatctccttctttagctcaaggttgctgcaagctggagctgagctgtcagtggaacgggtcctggaaatcattaagcaaggcgtcgttgcgctgcccaaagacagactgaagaaatttccagaattgaaattcaaatatgtggaagaggagcagcccgaggagttttttatcccctatgtctggtctcttgtctacaactcagcagtcggcctgtactggaatccacaggacatccagctgttcaccatggattccgactgagggcaggatgctctcccacccggacccctccagccaagcagcccttcaagttcttttatttctgggtaacagaagtagacagacaggttacttggtgtatcttctgttaaagaggattgcacgagtgtgttttcctcacacactttgatttggagaattggtgctagttggcaatagataactcagcgtagatagtattgcaaaaaggggaggaaatacacaacaataataaatgtaaaaacctgctattcaacatgcagttttatttcgaagccaaaaatctagagctttcccaagatcctgttgccttaggcacatcacacttcaacagtgcacactatccaacagtgcacactattcaacagtgcacactattcaaaagcgtagactatttttttgcatgttcaagatatttgttttggtcttatgtgtgtgtgagagagagagattcctttgacattaaggagcatcaatgagaaaagatgatgaggcaggaattaataaagaaatgaagtcgtgtgtgtttggttgcctgtcagagggcacacaatttcataaacaccatgcctggacaatttgatattaatatttaacacctctgcatcttttcttaaaaaagaatatgggccagatacagtggctcacatttgtaatcccagcactttggggagccaagttagcagaatcccttgagcacaggaatctgaaaccagcttgggcaacatagtgagatcccatctctacaaaaaacttaaaaattagccaggcatgatggcacattcctgtagtcctagctactcaggaggctaaggtaggaggattgcctgagcccaggagttcaaggctgcagtgagctaagaacgtgccagtacactccagcctgagccacaaagtgagaccctgtctcgcaaaaaaaaaaaaagaaagaaaagaaaaagaaaatggctacttctcatgaagcccagattaacttttctgtgaatatggcctgtgaactgttgctggaattaaattggagtctagcacaaattaagttaatctactctgtattaatcattgggaaaaagaaaagcttcatttgaaaacagtctttttccttcacccacactaatagaaaaaggagagtaatttgttcatactgtattccacgtgggatgaaaagcatgttttgctctttgtttctgggccggtgtgatccgtgtgttggtgcctgagctggaggaaggagcttcttgcagggaaacagccactggggccacattgagggccagttgggaccttcctttccagtcacactctgtgtcctcacgggccccttcacagtctagataaggagcctagtttcattctcaaagaaaaagtatttggtcttcaacatagaaagcacaaaagcccagacgagactgagcacactgttcgaatccactgccagctcatctgtgtcagggctggcttctcctgtcctgtgtcccagggctgcaggcccgtgttatttgagtccatcaaatcttccgagggcctcggaggaaccattctcagtcaccccaagctctgtaaaaggtcaaaacactggcagcctctcagtgcaccactgtgtgggctccacacgggaaggcctggccaagctgtgctcttagaggctgtcgaggtagggcaggaagcttccctatcctcgtctggatggaatgaaacagaggttccctaaggccaagggactcgtggagcgcccatcccgggtggggtcccagaggtgagtgcagcttgcctcctgtccccaaggggcttgttctgtcaggcctcctccagtcactgctggagtggggactctgactcctgtgttcacctcagagcccatgtacaggctagaggtgaggcttggcaacaacttctactaatacttagctttgtggcagagccagtctgaaggaggagaagcgctctcagccagcagggggagtgatgattatcatttcaggtagcaaggatatgtatttactatgtggggaaataatttgcaactttaatttgtttccaaagcattttgattggcttccttttcctttaaaccaaaaaattgtttaaatgtttaagggtcatgtggaacagctgagcttctggcaggaccacagaactgtcctctgagtctgagggctgggcagtgccacaggacagtccctgggctgcaggactgtcagtgcttgttgtgtgaggaaatgaggcccttcaaaaacccagtcatcttgacagagggcacactcccaaggaaggcctgactggggaatcatacagcctctcctccaggcctctgggctcactgaggtgcccccagaaccctgattgccctcccctctttcccttttctcattcatcacacagtagaagcactcactagctaacagctcagctggggcagcagcctccatggaggcctgcaagtgatgctcccagtcctggttcccgctcaggagggaggccccaccacgtgcatcactgcctcagctctgcaaagtcaccagaggcttcttcctgatttttgtgaaagatttattatatggca

SEQ ID NO: 838 - protein, 656 aa, Homo sapiens
MGSNSSRIGDLPKNEYLKKLSGTESISENDPFWNQLLSFSFPAPTSSELKLLEEATISVCRSLVENNPRTGNLGALIKVFLSRTKELKLSAECQNHIFIWQTHNALFIICCLLKVFICQMSEEELQLHFTYEEKSPGNYSSDSEDLLEELLCCLMQLITDIPLLDITYEISVEAISTMVVFLSCQLFHKEVLRQSISHKYLMRGPCLPYTSKLVKTLLYNFIRQEKPPPPGAHVFPQQSDGGGLLYGLASGVATGLWTVFTLGGVGSKAADELSSPLANQSLLLLLVLANLTDASDAPNPYRQAIMSFKNTQDSSPFPSSIPHAFQINFNSLYTALCEQQTSDQATLLLYTLLHQNSNIRTYMLARTDMENLVLPIILYHVEERNSHHVYMALIILLILTEDDGFNRSIHEVILKNITWYSVLTEISLGSLLILVVIRTIQYNMTRTRDKYLHTNCLAANMSAQFRSLHQYAAQRIISLFSLLSKKHNKVLEQATQSLRGSLSSNDVPLPDYAQDLNVIEEVIRMMLEIINSCLTNSLHHNPNLVYALLYKRDLFEQFRTHPSFQDIMQNIDLVISFFSSRLLQAGAELSVERVLEIIKQGVVPKDRLKKFPELKFKYVEEEQPEEFFIPYVWSLVYNSAVGWNPQDIQLFTMDSD

SEQ ID NO: 839 - DNA, 5739 bp, Homo sapiens
ggaggcacgaataacacccaaaggactacagtttccagaagcccgcgcgcgccgcgtgccacgtgaccacctggctggcgcgcgcgcctgggggtctggtccctagccgcgttctcggtcgcttccctcttctctcgccgcctcctggcctccgcaccgacgcggcccgggctggagccgagccggggccgagctgcaggccggaccggagccggatctgtacccgctgagacgtggaaacatggaggcctgagccggtgtgcgccacctgggctgcggcggcgacagcgacttctcctgacccctctgccaccctcccatccgtccgcgggtccgtggagctggagcagatcccccagccggctgagacaggttgtcttttggaaatgcaggtttaaggacaaattatctgcttaagctagaagatgggatcgaatagcagcagaatcggcgatcttcctaaaaatgagtacttgaaaaagttatcaggcacggaatctatctctgagaatgacccgttctggaatcagcttctctcattttctttccctgcaccaactagcagtagtgagttgaaactcttggaggaagcaaccatttcagtctgcaggtcattagttgaaaacaatcctcgaacaggaaatcttggtgcactaattaaggtcttcctttctagaaccaaagaactaaaactttcagcagaatgtcagaaccacatcttcatttggcagacacacaatgctttgtttattatttgctgtttgctgaaagtgttcatctgtcagatgtcagaggaggaattacaacttcattttacttatgaagaaaaatctcctggcaattacagttctgactcagaagatcttttggaagaattgctgtgctgtttgatgcagttgatcactgatattccactcttagatattacatatgaaatatcagtagaagctatatcaacaatggttgttttcctttcctgccaactcttccacaaagaagttttgcgacagagcatcagccacaagtatttgatgcgaggtccatgtcttccatacaccagcaaacttgtgaagaccttattatataactttatcagacaagaaaagccacctcctccaggggcccatgttttccctcagcagtcggatgggggaggactgctttatggacttgcatcaggagtagcaacaggactctggactgtcttcacactaggtggtgtgggcagcaaagcggctgcctctccagagctttcttcccctctggccaaccagagtctcctgcttctgctggtgttggccaatctgacagatgcctcagatgcgccaaacccctacagacaagccattatgtccttcaagaacacacaagatagcagtcctttcccctcatcaattccacatgccttccagatcaactttaatagtttgtacacagctctttgtgaacagcagacatctgatcaagcaactctcctcttgtataccttgctccatcaaaatagtaatattagaacatacatgttggctcgcacagatatggaaaatcttgttttaccaattcttgagattctgtatcatgttgaagaaaggaattcacaccatgtgtatatggcccttataatattgttgatccttacggaagatgatggcttcaacagatccattcatgaagtgatactaaaaaatattacttggtattcagaacgagttttaactgaaatctccttggggagtctcctgatcctggtggtaataagaaccattcaatacaacatgactaggacacgagacaagtaccttcacacaaattgtttggcagctttagcaaatatgtcggcacagtttcgttctctccatcagtatgctgcccagaggatcatcagtttattttctttgctgtctaaaaaacacaacaaagttctggaacaagccacacagtccttgagaggttcgctgagttctaatgatgttcctctaccagattatgcacaagacctaaatgtcattgaagaagtgattcgaatgatgttagagatcatcaactcctgcctgacaaattcccttcaccacaacccaaacttggtatacgccctgctttacaaacgcgatctctttgaacaatttcgaactcatccttcatttcaggatataatgcaaaatattgatctggtgagtgtaaatgaagacatttattatgattcttttttaagtattaaagcagagaatgtttaataagccttggtaagaactataatagtaagagtttcttctttcaacattaactgtatttgcagtctattttactataatagttgtggtaatctgtgtgtgtgttgtatatacacacacatacatatttaatacaattgaagtcatacttcatacagttttttattctgacttttttactttacacttagaccatgagcatttttctgtggtattatcaattctttgaaagtctcacattttaatttctatctagcccatgtttgtgtcctaaaatatatataactattatcccatttttgctcatttatttccagtattttatatcaattcataatgaatgaaaagtttataaataagtcttatctcaaattttaaaattatatttttgatatggttttaaagctggaattttactagtttttactgtcaaaagatatctttattttcaagattcaacacaggttgccaaattgctttccagaaaaactgtagaatttatgcctgtgggccgggtgtggtggctgatgcctataatcccagctacttgagaggctgaggcaggagaatcgcttgaacccaggaaatagaggttgcagtgagccgagatcacaccattgtactctggcctgagcaacgagagtaaaactccgtctcacacacaaaaaaaaaaaaaaaaaaaaaaaagtgatctccttctttagctcaaggttgctgcaagctggagctgagctgtcagtggaacgggtcctggaaatcattaagcaaggcgtcgttgcgctgcccaaagacagactgaagaaatttccagaattgaaattcaaatatgtggaagaggagcagcccgaggagttttttatcccctatgtctggtctcttgtctacaactcagcagtcggcctgtactggaatccacaggacatccagctgttcaccatggattccgactgagggcaggatgctctcccacccggacccctccagccaagcagcccttcaagttcttttatttctgggtaacagaagtagacagacaggttacttggtgtatcttctgttaaagaggattgcacgagtgtgttttcctcacacactttgatttggagaattggtgctagttggcaatagataactcagcgtagatagtattgcaaaaaggggaggaaatacacaacaataataaatgtaaaaacctgctattcaacatgcagttttatttcgaagccaaaaatctagagctttcccaagatcctgttgccttaggcacatcacacttcaacagtgcacactatccaacagtgcacactattcaacagtgcacactattcaaaagcgtagactatttttttgcatgttcaagatatttgttttggtcttatgtgtgtgtgagagagagagattcctttgacattaaggagcatcaatgagaaaagatgatgaggcaggaattaataaagaaatgaagtcgtgtgtgtttggttgcctgtcagagggcacacaatttcataaacaccatgcctggacaatttgatattaatatttaacacctctgcatcttttcttaaaaaagaatatgggccagatacagtggctcacatttgtaatcccagcactttggggagccaagttagcagaatcccttgagcacaggaatctgaaaccagcttgggcaacatagtgagatcccatctctacaaaaaacttaaaaattagccaggcatgatggcacattcctgtagtcctagctactcaggaggctaaggtaggaggattgcctgagcccaggagttcaaggctgcagtgagctaagaacgtgccagtacactccagcctgagccacaaagtgagaccctgtctcgcaaaaaaaaaaaaagaaagaaaagaaaaagaaaatggctacttctcatgaagcccagattaacttttctgtgaatatggcctgtgaactgttgctggaattaaattggagtctagcacaaattaagttaatctactctgtattaatcattgggaaaaagaaaagcttcatttgaaaacagtctttttccttcacccacactaatagaaaaaggagagtaatttgttcatactgtattccacgtgggatgaaaagcatgttttgctctttgtttctgggccggtgtgatccgtgtgttggtgcctgagctggaggaaggagcttcttgcagggaaacagccactggggccacattgagggccagttgggaccttcctttccagtcacactctgtgtcctcacgggccccttcacagtctagataaggagcctagtttcattctcaaagaaaaagtatttggtcttcaacatagaaagcacaaaagcccagacgagactgagcacactgttcgaatccactgccagctcatctgtgtcagggctggcttctcctgtcctgtgtcccagggctgcaggcccgtgttatttgagtccatcaaatcttccgagggcctcggaggaaccattctcagtcaccccaagctctgtaaaaggtcaaaacactggcagcctctcagtgcaccactgtgtgggctccacacgggaaggcctggccaagctgtgctcttagaggctgtcgaggtagggcaggaagcttccctatcctcgtctggatggaatgaaacagaggttccctaaggccaagggactcgtggagcgcccatcccgggtggggtcccagaggtgagtgcagcttgcctcctgtccccaaggggcttgttctgtcaggcctcctccagtcactgctggagtggggactctgactcctgtgttcacctcagagcccatgtacaggctagaggtgaggcttggcaacaacttctactaatacttagctttgtggcagagccagtctgaaggaggagaagcgctctcagccagcagggggagtgatgattatcatttcaggtagcaaggatatgtatttactatgtggggaaataatttgcaactttaatttgtttccaaagcattttgattggcttccttttcctttaaaccaaaaaattgtttaaatgtttaagggtcatgtggaacagctgagcttctggcaggaccacagaactgtcctctgagtctgagggctgggcagtgccacaggacagtccctgggctgcaggactgtcagtgcttgttgtgtgaggaaatgaggcccttcaaaaacccagtcatcttgacagagggcacactcccaaggaaggcctgactggggaatcatacagcctctcctccaggcctctgggctcactgaggtgcccccagaaccctgattgccctcccctctttcccttttctcattcatcacacagtagaagcactcactagctaacagctcagctggggcagcagcctccatggaggcctgcaagtgatgctcccagtcctggttcccgctcaggagggaggccccaccacgtgcatcactgcctcagctctgcaaagtcaccagaggcttcttcctgatttttgtgaaagatttattatatggca

SEQ ID NO: 840 - protein, 594 aa, Homo sapiens
MGSNSSRIGDLPKNEYLKKLSGTESISENDPFWNQLLSFSFPAPTSSSELKLLEEATISVCRSLVENNPRTGNLGALIKVFLSRTKELKLSAECQNHIFIWQTHNALFIICCLLKVFICQMSEEELQLHFTYEEKSPGNYSSDSEDLLEELLCCLMQLITDIPLLDITYEISVEAISTMVVFLSCQLFHKEVLRQSISHKYLMRGPCLPYTSKLVKTLLYNFIRQEKPPPPGAHVFPQQSDGGGLLYGLASGVATGLWTVFTLGGVGSKAADELSSPLANQSLLLLLVLANLTDASDAPNPYRQAIMSFKNTQDSSPFPSSIPHAFQINFNSLYTALCEQQTSDQATLLLYTLLHQNSNIRTYMLARTDMENLVLPIILYHVEERNSHHVYMALIILLILTEDDGFNRSIHEVILKNITWYSVLTEISLGSLLILVVIRTIQYNMTRTRDKYLHTNCLAANMSAQFRSLHQYAAQRIISLFSLLSKKHNKVLEQATQSLRGSLSSNDVPLPDYAQDLNVIEEVIRMMLEIINSCLTNSLHHNPNLVYALLYKRDLFEQFRTHPSFQDIMQNIDLVSVNEDIYYDSFLSIKAENV

SEQ ID NO: 841 - DNA, 4992 bp, Homo sapiens
ggaggcacgaataacacccaaaggactacagtttccagaagcccgcgcgcgccgcgtgccacgtgaccacctggctggcgcgcgcgcctgggggtctggtccctagccgcgttctcggtcgcttccctcttctctcgccgcctcctggcctccgcaccgacgcggcccgggctggagccgagccggggccgagctgcaggccggaccggagccggatctgtacccgctgagacgtggaaacatggaggcctgagccggtgtgcgccacctgggctgcggcggcgacagcgacttctcctgacccctctgccaccctcccatccgtccgcgggtccgtggagctggagcagatcccccagccggctgagacaggttgtcttttggaaatgcaggtttaaggacaaattatctgcttaagctagaagatgggatcgaatagcagcagaatcggcgatcttcctaaaaatgagtacttgaaaaagttatcaggcacggaatctatctctgagaatgacccgttctggaatcagcttctctcattttctttccctgcaccaactagcagtagtgagttgaaactcttggaggaagcaaccatttcagtctgcaggtcattagttgaaaacaatcctcgaacaggaaatcttggtgcactaattaaggtcttcctttctagaaccaaagaactaaaactttcagcagaatgtcagaaccacatcttcatttggcagacacacaatgctttgtttattatttgctgtttgctgaaagtgttcatctgtcagatgtcagaggaggaattacaacttcattttacttatgaagaaaaatctcctggcaattacagttctgactcagaagatcttttggaagaattgctgtgctgtttgatgcagttgatcactgatattccactcttagatattacatatgaaatatcagtagaagctatatcaacaatggttgttttcctttcctgccaactcttccacaaagaagttttgcgacagagcatcagccacaagtatttgatgcgaggtccatgtcttccatacaccagcaaacttgtgaagaccttattatataactttatcagacaagaaaagccacctcctccaggggcccatgttttccctcagcagtcggatgggggaggactgctttatggacttgcatcaggagtagcaacaggactctggactgtcttcacactaggtggtgtgggcagcaaagcggctgcctctccagagctttcttcccctctggccaaccagagtctcctgcttctgctggtgttggccaatctgacagatgcctcagatgcgccaaacccctacagacaagccattatgtccttcaagaacacacaagatagcagtcctttcccctcatcaattccacatgccttccagatcaactttaatagtttgtacacagctctttgtgaacagcagacatctgatcaagcaactctcctcttgtataccttgctccatcaaaatagtaatattagaacatacatgttggctcgcacagatatggaaaatcttgttttaccaattcttgagattctgtatcatgttgaagaaaggaattcacaccatgtgtatatggcccttataatattgttgatccttacggaagatgatggcttcaacagatccattcatgaagtgatactaaaaaatattacttggtattcagaacgagttttaactgaaatctccttggggagtctcctgatcctggtggtaataagaaccattcaatacaacatgactaggacacgagacaagtaccttcacacaaattgtttggcagctttagcaaatatgtcggcacagtttcgttctctccatcagtatgctgcccagaggatcatcagtttattttctttgctgtctaaaaaacacaacaaagttctggaacaagccacacagtccttgagaggttcgctgagttctaatgatgttcctctaccagattatgcacaagacctaaatgtcattgaagaagtgattcgaatgatgttagagatcatcaactcctgcctgacaaattcccttcaccacaacccaaacttggtatacgccctgctttacaaacgcgatctctttgaacaatttcgaactcatccttcatttcaggatataatgcaaaatattgatctggtgatctccttctttagctcaaggttgctgcaagctggagctgagctgtcagtggaacgggtcctggaaatcattaagcaaggcgtcgttgcgctgcccaaagacagactgaagaaatttccagaattgaaattcaaatatgtggaagaggagcagcccgaggagttttttatcccctatgtctggtctcttgtctacaactcagcagtcggcctgtactggaatccacaggacatccagctgttcaccatggattccgactgagggcaggatgctctcccacccggacccctccagccaagcagcccttcaagttcttttatttctgggtaacagaagtagacagacaggttacttggtgtatcttctgttaaagaggattgcacgagtgtgttttcctcacacactttgatttggagaattggtgctagttggcaatagataactcagcgtagatagtattgcaaaaaggggaggaaatacacaacaataataaatgtaaaaacctgctattcaacatgcagttttatttcgaagccaaaaatctagagctttcccaagatcctgttgccttaggcacatcacacttcaacagtgcacactatccaacagtgcacactattcaacagtgcacactattcaaaagcgtagactatttttttgcatgttcaagatatttgttttggtcttatgtgtgtgtgagagagagagattcctttgacattaaggagcatcaatgagaaaagatgatgaggcaggaattaataaagaaatgaagtcgtgtgtgtttggttgcctgtcagagggcacacaatttcataaacaccatgcctggacaatttgatattaatatttaacacctctgcatcttttcttaaaaaagaatatgggccagatacagtggctcacatttgtaatcccagcactttggggagccaagttagcagaatcccttgagcacaggaatctgaaaccagcttgggcaacatagtgagatcccatctctacaaaaaacttaaaaattagccaggcatgatggcacattcctgtagtcctagctactcaggaggctaaggtaggaggattgcctgagcccaggagttcaaggctgcagtgagctaagaacgtgccagtacactccagcctgagccacaaagtgagaccctgtctcgcaaaaaaaaaaaaagaaagaaaagaaaaagaaaatggctacttctcatgaagcccagattaacttttctgtgaatatggcctgtgaactgttgctggaattaaattggagtctagcacaaattaagttaatctactctgtattaatcattgggaaaaagaaaagcttcatttgaaaacagtctttttccttcacccacactaatagaaaaaggagagtaatttgttcatactgtattccacgtgggatgaaaagcatgttttgctctttgtttctgggccggtgtgatccgtgtgttggtgcctgagctggaggaaggagcttcttgcagggaaacagccactggggccacattgagggccagttgggaccttcctttccagtcacactctgtgtcctcacgggccccttcacagtctagataaggagcctagtttcattctcaaagaaaaagtatttggtcttcaacatagaaagcacaaaagcccagacgagactgagcacactgttcgaatccactgccagctcatctgtgtcagggctggcttctcctgtcctgtgtcccagggctgcaggcccgtgttatttgagtccatcaaatcttccgagggcctcggaggaaccattctcagtcaccccaagctctgtaaaaggtcaaaacactggcagcctctcagtgcaccactgtgtgggctccacacgggaaggcctggccaagctgtgctcttagaggctgtcgaggtagggcaggaagcttccctatcctcgtctggatggaatgaaacagaggttccctaaggccaagggactcgtggagcgcccatcccgggtggggtcccagaggtgagtgcagcttgcctcctgtccccaaggggcttgttctgtcaggcctcctccagtcactgctggagtggggactctgactcctgtgttcacctcagagcccatgtacaggctagaggtgaggcttggcaacaacttctactaatacttagctttgtggcagagccagtctgaaggaggagaagcgctctcagccagcagggggagtgatgattatcatttcaggtagcaaggatatgtatttactatgtggggaaataatttgcaactttaatttgtttccaaagcattttgattggcttccttttcctttaaaccaaaaaattgtttaaatgtttaagggtcatgtggaacagctgagcttctggcaggaccacagaactgtcctctgagtctgagggctgggcagtgccacaggacagtccctgggctgcaggactgtcagtgcttgttgtgtgaggaaatgaggcccttcaaaaacccagtcatcttgacagagggcacactcccaaggaaggcctgactggggaatcatacagcctctcctccaggcctctgggctcactgaggtgcccccagaaccctgattgccctcccctctttcccttttctcattcatcacacagtagaagcactcactagctaacagctcagctggggcagcagcctccatggaggcctgcaagtgatgctcccagtcctggttcccgctcaggagggaggccccaccacgtgcatcactgcctcagctctgcaaagtcaccagaggcttcttcctgatttttgtgaaagatttattatatggca

SEQ ID NO: 842 - protein, 657 aa, Homo sapiens
MGSNSSRIGDLPKNEYLKKLSGTESISENDPFWNQLLSFSFPAPTSSSELKLLEEATISVCRSLVENNPRTGNLGALIKVFLSRTKELKLSAECQNHIFIWQTHNALFIICCLLKVFICQMSEEELQLHFTYEEKSPGNYSSDSEDLLEELLCCLMQLITDIPLLDITYEISVEAISTMVVFLSCQLFHKEVLRQSISHKYLMRGPCLPYTSKLVKTLLYNFIRQEKPPPPGAHVFPQQSDGGGLLYGLASGVATGLWTVFTLGGVGSKAADELSSPLANQSLLLLLVLANLTDASDAPNPYRQAIMSFKNTQDSSPFPSSIPHAFQINFNSLYTALCEQQTSDQATLLLYTLLHQNSNIRTYMLARTDMENLVLPIILYHVEERNSHHVYMALIILLILTEDDGFNRSIHEVILKNITWYSVLTEISLGSLLILVVIRTIQYNMTRTRDKYLHTNCLAANMSAQFRSLHQYAAQRIISLFSLLSKKHNKVLEQATQSLRGSLSSNDVPLPDYAQDLNVIEEVIRMMLEIINSCLTNSLHHNPNLVYALLYKRDLFEQFRTHPSFQDIMQNIDLVISFFSSRLLQAGAELSVERVLEIIKQGVVPKDRLKKFPELKFKYVEEEQPEEFFIPYVWSLVYNSAVGWNPQDIQLFTMDSD

SEQ ID NO: 843 - DNA, 2916 bp, Homo sapiens
ggaggcacgaataacacccaaaggactacagtttccagaagcccgcgcgcgccgcgtgccacgtgaccacctggctggcgcgcgcgcctgggggtctggtccctagccgcgttctcggtcgcttccctcttctctcgccgcctcctggcctccgcaccgacgcggcccgggctggagccgagccggggccgagctgcaggccggaccggagccggatctgtacccgctgagacgtggaaacatggaggcctgagccggtgtgcgccacctgggctgcggcggcgacagcgacttctcctgacccctctgccaccctcccatccgtccgcgggtccgtggagctggagcagatcccccagccggctgagacaggttgtcttttggaaatgcaggtttaaggacaaattatctgcttaagctagaagatgggatcgaatagcagcagaatcggcgatcttcctaaaaatgagtacttgaaaaagttatcaggcacggaatctatctctgagaatgacccgttctggaatcagcttctctcattttctttccctgcaccaactagcagtagtgagttgaaactcttggaggaagcaaccatttcagtctgcaggtcattagttgaaaacaatcctcgaacaggaaatcttggtgcactaattaaggtcttcctttctagaaccaaagaactaaaactttcagcagaatgtcagaaccacatcttcatttggcagacacacaatgctttgtttattatttgctgtttgctgaaagtgttcatctgtcagatgtcagaggaggaattacaacttcattttacttatgaagaaaaatctcctggcaattacagttctgactcagaagatcttttggaagaattgctgtgctgtttgatgcagttgatcactgatattccactcttatattacatatgaaatatcagtagaagctatatcaacaatggttgttttcctttcctgccaactcttccacaaagaagttttgcgacagagcatcagccacaagtatttgatgcgaggtccatgtcttccatacaccagcaaacttgtgaagaccttattatataactttatcagacaagaaaagccacctcctccaggggcccatgttttccctcagcagtcggatgggggaggactgctttatggacttgcatcaggagtagcaacaggactctggactgtcttcacactaggtggtgtgggcagcaaagcggctgcctctccagagctttcttcccctctggccaaccagagtctcctgcttctgctggtgttggccaatctgacagatgcctcagatgcgccaaacccctacagacaagccattatgtccttcaagaacacacaagatagcagtcctttcccctcatcaattccacatgccttccagatcaactttaatagtttgtacacagctctttgtgaacagcagacatctgatcaagcaactctcctcttgtataccttgctccatcaaaatagtaatattagaacatacatgttggctcgcacagatatggaaaatcttgttttaccaattcttgagattctgtatcatgttgaagaaaggaattcacaccatgtgtatatggcccttataatattgttgatccttacggaagatgatggcttcaacagatccattcatgaagtgatactaaaaaatattacttggtattcagaacgagttttaactgaaatctccttggggagtctcctgatcctggtggtaataagaaccattcaatacaacatgactaggacacgagacaagtaccttcacacaaattgtttggcagctttagcaaatatgtcggcacagtttcgttctctccatcagtatgctgcccagaggatcatcagtttattttctttgctgtctaaaaaacacaacaaagttctggaacaagccacacagtccttgagaggttcgctgagttctaatgatgttcctctaccagattatgcacaagacctaaatgtcattgaagaagtgattcgaatgatgttagagatcatcaactcctgcctgacaaattcccttcaccacaacccaaacttggtatacgccctgctttacaaacgcgatctctttgaacaatttcgaactcatccttcatttcaggatataatgcaaaatattgatctggtgagtgtaaatgaagacatttattatgattcttttttaagtattaaagcagagaatgtttaataagccttggtaagaactataatagtaagagtttcttctttcaacattaactgtatttgcagtctattttactataatagttgtggtaatctgtgtgtgtgttgtatatacacacacatacatatttaatacaattgaagtcatacttcatacagttttttattctgacttttttactttacacttagaccatgagcatttttctgtggtattatcaattctttgaaagtctcacattttaatttctatctagcccatgtttgtgtcctaaaatatatataactattatcccatttttgctcatttatttccagtattttatatcaattcataatgaatgaaaagtttataaataagtcttatctcaaattttaaaattatatttttgatatggttttaaagctggaattttactagtttttactgtcaaaagatatctttattttcaagattcaacacaggttgccaaattgctttccagaaaaactgtagaatttatgcctgtgggccgggtgtggtggctgatgcctataatcccagctacttgagaggctgaggcaggagaatcgcttgaacccaggaaatagaggttgcagtgagccgagatcacaccattgtactctggcctgagcaacgagagtaaaactccgtctcacacacaaaaaaaaaaaaaaaaaaaaaaaa

SEQ ID NO: 844 - protein, 416 aa, Homo sapiens; identical to SEQ ID NO: 832

SEQ ID NO: 845 - DNA, 228006 bp, Mus musculus
  misc_feature (1)...(228006): n = A, C, G or T/U
acattctgtcccaggacagaacttaagcagactgccttctatggtggctttcttctatggtgccagcccagtgcctccaagtgacagctcctccagccaccctgtaaaggaaaatagctgcccactctcttctcagagcagtgagctctctgcatatttctgtatagactgtcaagtgggcgtcacttccaacttgctctagatttatttccaagttcttaggggcacacgcatttttgtgctcataggcgacctctttttactctctcgctggacactgtcatacttggacatctggaggtccaggcatgcaacatgtgggtgaggggagccgtgtgcctgatgactgtggccaatggggaggtaacaatggggtcccaggcctatgcaagctgtaggttgactgtggtctaactagaccgatatgccttcccatcagctgactgttaaagtatgaaaaggtgggccagagttgactgaccttctgaaaagtcgaaatgtggatacttgcacgagatcttttgatttatagatattcactcaaatattttttaagccctcagtcagataaaacacatcatagtccaagggtggctaagagctgcaggtgtctctgttttgtggctgtgctggtgtgcaggatgaatttgtcatctgaggggtggtgtgtgtagtggtttaagtgaaaatgtcccctgtagcctcccgcatatgaaaccttggtccccggttggaagagctgtttgggaaggctgaggaagtgtggccttgttggcagaagtatggcattggaggaggggaaagagagggggggagggggagnnnnnnnnnnnnnnnnnnnngagagggagagagagagagagagagagagagagagagccctcacaatttcttgtttgtttactttgagtcctgcttcagttcaccatgtgagctctcgtctccatcctacagctgccatgcttgacaagtgcccatcatagtgatgacttctttcccctctggaagagtaagccctaagaagggcttccttctagaagttgctttggtcaaggtgttttatcacaatgatagaagaaaaaaacaaaacaaaacaaaacaaaacaaaaaaactatgtacctgtgcagaggccagtgggccctgtgaaccactgaagagctgttttgagagccactgtgagccgagggtccaggtgacaagaggacagcttgaggagagagaaatgggtactgttcttggcttgacaccgtcagtgtcttctcttgatactgaagaccagcggaccctcctgtgtggtatagccccactgagacccaggggcctgaaccactgatcctactgggctgttgttcaggaagatgttgcagagacaaagagaactagctgggggactgtggttaccccaggagggacactggagagtaagtgttacctgaggagggcctgggtgatggggccactgcatttagagttttcaggcctaacctgaagtgtccttctgggttcacagcaggacacatttggtctcccttccccttcctaacacgctctcaggtagttctttttcttagtgtgtaaatccagaggcaccagtgggaggcgggggtagcggcagccatctacctggagtgcagggaagaaagagactgggtcctcttgagtctgtgcagcatggcagaactgagggtaccccagatttgtaacctgggagaggatcagacttaaggctcagtcaaggcatggggaatctaagatggtgcgaccttaaagatcgcgctccctggcagcagtagtcaaggagagcttcatggagggtgcggtattcctggaaacattccctaaacccaagggtgtgtagttcaaagaggcagaggcaaagaggcagaggcaagagagagtgcaaaagcagagtgagggagaacagaggtggcctcgaggtccagcagtaaatgagggcttgctgggtacctgggtggggtgagcccctctctcatgcatcattgtgcctcgtccttgcagttcattatgaggcatatgttcatcagcgtggtttacagacaagcaggcaggcgagggatagtccagagttatgtatgcagtaggcattgagctaaccagtggtacaatcagatcccataccctttatattcttccatctcaagagcagaggcagtgatgaaaccacctggctccaacaagagtgtgtggttcacttggctggctggtgaccctgcacagctttggtcagttgtacctgacctccatgtcccccggcacctgtagggtacagtgctcaacaagagtccaggactccttagttgtaatagatagtcttgaggaggctctgggacattataggaagatgtcaagccatggattgggaggaagatagtggacaagaggatccctgcgtcctgtgtttgacattcgagaagctggaggggactggagagaacaggatctcagtggccactggcaggagaactaaggaagctggtcctgaagcccacgctagggtgtgtgggaggcctgaacttggggtggagacaggtataagatacggcagcacctcaaagatcttgctgtcttgtcaaggctagataaagacccataaatattttaagaacagcccagggctgagtaacaggatcggggaggataataaggtgtcagaggcattgtgcttcgagccaagggaggtggtcaatatcagatgcaagtggaggcccctgtggtccttgagaatttgaagggaaggcagacctgtatgtacagtagggatatcccagaaataatgcagggactggacctacagagcctgcctgaatgcagtcccctgcctcaggtgtcctggacccagctgctgctctgacatttctctcttgagaaacacagctggaggcctgggctggaaggaggatgtcatgacagatcacctagcccctctctcagcttctctctatctagaccttccaggactgatggcagctgcacagaccagctaccctcagaggccacagcgcaagtcctgccttctgctgcctgtgtctgtacaccttctcatgggtgcctgctcccagtcaccctgaccttgctctcaggatggagcagtgagcaaaaggggctctgtccagagttgactcacatagtagggctacatacaggatgacttagtctcctatagagtgttccccaccctctcatgcccactctgtgctaatgatggtaacccagatctacacttggagggtcacaaaggctggccgtcaccaggagacggggagctgattcggatgggtgaattgtgtctaggctgactatagcaagaggcatctgtgcatcctccggcaagtgtttttacctgcaggttttgatcccttcatctgcacagggtgccctgtgaggctgtattctcgtagtgccactagagccttgcatcccagattttaggaacaagcacagtgtggaggtagtacccaggaccacctccctccccaggagatagttccctcagcccactgaggtcctactctgtgcaaactctccctgcacaccgcatggatggtaagaggagagctcacatcttatgactacctagccaaaaggtcaggatggagcctccagctattccactatgccagggggtggggcgggatatctgaataggtgggagtgataagtcagcttctctgatcttgggtagcctaaagatagttagtcctctgccaccaccagcagcctgagagctggctagaaacatagactcccaaaatccatgttggtacatgcccataatcccaacatttgggagacagaggcaagatgatcaggaattcaagaccaacctggggtatgtagtgagtctgttttaaggaaaaacagcctcagaatttgctctctagctccaagctactgagtcgggacttattgtaacatgatgatggggactctgtgcccattgagttttggggagcacccagtctgtctgctaggcttctcttctcttttggtcctgcccactcccagaaatgcatcatgatggacaagtgcaacaaaagttctagaagcacagggtatatgaaggtgcctcacattctttaatcctgtgatcatggcaccaggcgtttgttttataacagaccagcattctgaataacaccctacccaatgttagggtaacaaagggttaaagtggggttggtaaagcaggggagtcctcattcagaggatgatagatgtcctacctcctgctgcagtaaatgtctctggttttgaagtcctacctccactactgtgtttctgaactttcccacttctcaggggttggagaacctgagatttctgttcacacaggccaccactgaaccgtcctatgtgcctctggcacacatgaatatattgagtcattgggccagcgccaactatagcaaccagacaatagggatcaagaattgattgcctgggaaatcgtattttctacagagtcatctgtgaggggttagagaacagacctgatgagatggcctgacagagaaaaggttcccatggctgcctctggacagctatgggcatcttccctcccagacagcccatgtctctcttcccgcaggctttatatatatcacactggcctatgtctgcctggcaagtcacgaagaactgtcatcccagctgtattctgggtgaagctattctagctggctctgtgtggtaggggatctcgggaactagcatgtgatggcaacagccagcacgtttgtaacatggtcaccaggaacaaactgcgagtagggaacccaagggtatggtgctctgagtaaccaggccttctaggaagtggtgcaggcaaagttgggatgaagtctttggtagatatgatgattgttattaacaaaaatggctcagtgaacccatgttggatcccctgccttcaaagctcagacattaccctgaggcagagttcacatccttttgtgatcaagcacagactggagagcaccaacttctgagccttggagcatcaagcaacccctcccccttcacttctagggtcccttacagcttccgtggcttcccttacagcttgcctggcttcccttgcagctactctggcttcccttgcagcttgcctgggatcccaaagggagctaagtcctttgttgctgctcaagccaaaactgagccaagaaagtagactttgagatctttgtatcttcttgtgtgaggtccagcaactctgctgggtgggttagatgctgaaggggttagggaatgagcttgaggaagttaggggcctaaaaatggatggattccccaggaatggcaggtttcccagcagtcaaacctctcctgacctgcaggtcacctagcttattcctgagcagggaggggagggggaatgcctctaatgcctgtctgttcttaaaaggattggctaaatttacagcacctaatgccttttgattctgagcaggttgagggtggaaggataatgaagggtggagactatcttattgtttctaggcctacagggtgccctgtgatgtgagtgttaactttgtctctgggccaatagaccaagggagggtactgtgagcctctgggttcagagccaggtaggaccagagggagaaggaaagataggttcctcagcagaaacccctatgctttgtgctggctttttatggaagctgcagacaacactggggggaaaaaaaagaggttgggttgtaagggtctgaaggaggggaatgcagtgtagggagggtatctttacattagagggtgggtattttaaatttctaatcttaagcagtcaggtagtgaggggctgtagctgcagcatgtgtatggcccagctggaatgtgatcacagcacacagccagggatgtctcttcttcgagacagacataggtgtgcccgtcattctctctgggaattgcaagggtccctaacccctacttcgtgctatgtctgcttcagctccatccttgcctgcagccttagggtaaccccctcccttttgctgcctttacagcaaaatgcagctttagggctttttctcctactggcttttgggtcctcctcatccgtcacctggcagggaataggggcaggacaaggtcccagggactcactgcagagaccagctcctgggaggggcatctcttcatgttctgtgcctgagtgactgagttgggggtccttggttctcttctacgctctcttctctccttttccttcttgcatggtcccaaccttcttgttcactttgactttctgtgaagaccagaaccctcctcctctgtggctcctagctcagcctgctacccagctacataaggtgctcccatcactcctcactgtgacttagaagctgaattaggagcgaaagcagtggaaagatgcactcactgtggtgggagcgcccttctggccttgtagatgtggggggggggggacctgcaggtctgtgtcccaaaggattgagtaaacatagttgcacacccacgttcatagcagattctccacagccagatgtgagaacggcccacatgccagttaatggagtagtagatggtcagagtaaatacacatgatagattactgtaattcagtatctcaccagccataagagaaccttgagtgcattgtgaaataaagcaattatagaagtgttgtatgactccacataaacaaagtaccaagaataaataagtcatagagccagaaggaaggtaaggttaaccagggcccgtgcctgggcctgggcctgagcctaagcctggggaatgaaatattcgtgtgcagtggatgaagggcttcagtttgggataatgaaaagtttcagaaatggaaatgggtagtagtcatagttatagaacattgtggccatacttaaagctattgagttgtatatttgaaaaaatgtccatgtataatttaaacacagtggacaagtagctgatggacacggtataggagattgcagcgtgagagcagggagaaagacctgcctggcatctgcttgggatcttgttgcttttgggggtgagtttcccaggagtgacttcatagaagacaaggatggtatctctgtaaactatgttcctgaggagagaggatatgacaggatacaagagaggcctactgtaggtctgctcactactgtaaacaactggggcccaatctgcttaaggcctactgaatgatcacaaagctgccaccttgggattgtcatcaaaggccaaaaggtagagctatgttcctatataagatgtccctgtgaggtgctggacccttccacttccaggtcacaggactcaggtgggtcctgtaggttatctacagtctgaacagccctaagcaggtggcacctgatgccaggtgctgtcagctgtgcctggaacagattggacaacagcaactgggttagtaggggccaaaaggagcacatggataaataggtgtgcaagaatgaatgaatgaatgagtgaaaatgaataaataggtacccatggaatagtccttttttctcccctttgaaaactaaaatattgcaggatccaactgaatcacaattctttgccttacctcagtgagccaggtgggatcgttgccatgtctggtttcctcacaggacatgtgttcatgacactcatgtgcctagaggggcccacaagctgccccagcaggccaaccctacactccattctggggactccatgtcaagttcatgcaaaggcccagttctggatgtgcctagaagctctgggtaagggctgaggtcttcaaggaataacagacacagcattaggtatggactatgtcagcaggtgtctcctctgcagtccgctctagatggtggccctttggttcccctccagctcaggccagctgcacagggccaggccctgaacttgagcacattgcccttccccaggctgtactcaggcagggaataaaatgcacatttacatatctcaccactagaattaactgctcaatgggagggtagggggacagaaaactgagacatgtcctgaggacccacacaagctacctgcaagtaagaggaagggtgacaggttatagggatatagacacagtcacaccaacccctgtgaacatgggtatgttacttggcctctctgagaccatcttttcccttccaagtagtctgtttatgcgaatttcgtaaatattgggaagatgctgtgcatggggaggggtcatctatgctgagaaggctgcctcagcctgtgacataggtgcggtaaacattcacattgctattattaggaatctcatagtcatgtctgaagccacggctgggtgatccctttgcctgctagaccaccattaagcctgaagttggagagaccccagctggcgtctaggtcgctgctgtagaattccataagtggaagagggtctaggtttggaaagtagggattgaaagagtgcgggcagcaggcaatcaccctaccatcaccctttccccctgtacccccttcactttccctcccccactgctgctaccaccatcttcctactgctgtgtgaagaattaccacccccctttgggtcttgccacagcaccttctgttatcccacagttctgtaagtcaggagcctgccacccagcaggtacacacacacacacacacacacacacacacacacacacacggtctcagtgcttcagtactacagctgaacactccactgattcttggttattagcaaccaagcactcactggtgatccagaatccagaagagtgctcgagaatgtcgatgtcgacaccagttctcccattgagtgctcagggcctcacctctcttaccctgagcatcttcagatggcctgtgaagtgtccgcggcatctgctcttcagacctgctttgttattgtgcaaagggggagtctggagaaagtgcatgtagttgtgctgattgttcaagttgcatagcacttttcttgggggtcacgggtccctgggtggtgaaagagacataagacaagttttaacatacatcctttaccatcaagcctggagtccctctgtccgtgcaaggacggggtggggagcctggaagggagaagggttctggcttttcagataatggatgaagtgtgactatcagggacaaggggtggcagagggcagtggtgggtttgcgctcctatagactggggagacaattttgttggaagtctctagagctcatcccaggtacagctggttctgtctgtcaggttgaacttgagagtgggccagggggcttctgggatggtcacactcttctggaaagcgaggcagtacgtgtggcccagccacagtcacgtagataacccaccaagttttagcattccatcagtaaaaggcacccccccccgttcctatagaccaatgtagcacgtctccacagcaaggttatagaattctgctgataacctgaggcccacaggccacagcgatatatgcaacagtctgatgaccagaggggaagaaccctctcgatgggaggcatttcctgaagggattgtccctcttaaaggtgtttctatctgggatgttccaattcctacaccagggaaggtgtctattttgctctgtgtggatttaaagtcaggattttaagtcaagctggacagtaaggcttgggtgctggtctaggtttaccatctgctctcacaggcaatgagcactaacccagacaccgcacaagtcagcgtgctaggcaattagataagttacctgtgcctccctctggcctcagtttccctctcatcatagtgggaactcagcatattctatatgctaaagatcggccagaatcccactaatgtttctggcattgggagaccaaattgtttccaagagtgatgcgtatttctcaagtggggcattgtcctggcctccagcagcatctcaccgaggctgtctgtctgtcctcttcccagcagccggccccggtccctgagcccgaggaatggagaactcctcagcagcttcagcctcctctgaggcaggaagcagccgctcccaggagatcgaggagctggagcgcttcattgacagctacgtgctggagtaccaggtgcaggggctgctgaccgacaagacagagggtgacggcgagagccagaggacacagtcccatatctcccaggtgaacactggcccaggtccaagggcttctcgaactcaaaggcacggtactagggaccttaattctgactgtgttgttatcatttctcctcacgctactgtgatctcagtattggtgatctcacctgacacagcatccagaatcctggaggagagaggtttagagatccatccaggaagccttgacctctgctgagcacccttgacctttgaacccatctctgggacccaagcagaccaatgtctctgtgtcctctatgagcttatattctagagcagctctggagaccaaagctacccatcacgcatgtctttggggaactgtgactccgacttcaactacagacagttgttgggagcctaagatatgtgtcttctgtattgctctacagggtgctgtatgcctatgcacttatgtatgtgaggcattcagagaagaacctcagggtgctcccatctgccgggtcagtctgtctcaacttggccttgcaggggaggtgatcttacttggaaaactatgggctgtgatggctttagcaacctgtcatcacacacagtacatccccagtagattcttctgagagttgcttccaaatttggttctagatacccatttgaccttgtgtgaagcccccaatatcagaggctgttttcttttctcttttatttcttgnnnnnnnnnnnnnnnnnnnnnnnnnnnnnnnnnnnnnnnnnnnnnnnnnnnnnnnnnnnnnnnnnnnnnnnnnnnnnnnnnnnnnnnnnnnnnnnnnnnnnnnnnnnnnnnnnnnnnnnnnnnnnnnnnnnnnnnnnnnnnnnnnnnnnnnnnnnnnnnnnnnnnnnnnnnnnnnnnnnnnnnnnnnnnnnnnnnnnnnnnnnnnnnnnnnnnnnnnnnnnnnnnnnnnnnnnnnnnnnnnnnnnnnnnnnnnnnnnnnnnnnnnnnnnnnnnnnnnnnnnnnnnnnnnnnnnnnnnnnnnnnnnnnnnnnnnnnnnnnnnnnnnntcagcattccagggcacctcttgtagtgcccccttcaagcctgggtattcacgcaagggtaagctacttgggacccctgccgtagagaaccgccaaatgtaaccacctagctcactgcccagtaaggaggaaaatgtagtctcccactgtcttagtcagggtttctattcctgcacaaacatcatgaccaagaagcaagttggggaggagagggtttattcagcttacacttccacattgctgttcatcaccaaaggaagtcaggactggaactcacacagggtagggacttggaggcaggagctgatgcagaggccatggaagaatgctgcttactggcttgctccccctggtttgctctcggcttgctttcttagagaacccaagactaccagcccagggatggcaccacccacaatgggccctccccgattgatcactaattgagaaagtgccttacagctggatcttatggaggcatttcctcaagggaggctcctttcttgtgataactccagcttgtgtcaagttaacacacaaaaccagccagtacatccagctttttagaaaccagaatgaagccgagaccaggagtcagcctgggacatcctttattattttttttttcaaatttttctccttcatctccttcttaatgttcatttatatattttatatatatgagtacactgtagctgtctttagacacaccagaagagggcatcagatcctattacagatggtcgtgagccaccgcgtggttactgggaatcaaactcaggacctctggaagagcagaggtcagtactcctaactgctgagccatctctgcagcccagcctgggacagccttatgtagcaggagtcccctgccccatcccactgggctctggggggcagaatagagtcccctgcagttttccttagagcccttgatgttctaatgccacaagtatgtgggctcctaagcatctatcctctgaaggacctgggaggttttggaattgggagtgtgtaaaagctcaccttcctggaacttcttctcccgtgctggtgaccgtctcagccaggacggctactacacgcaactgagaagcccacagccggggctcatttgtttcttttatttgttgaagcaaagttgcagggttttttgtttgggtttttccgctttgtactatcagatggtttagtagatttaagtgcaagcattgagggagcgagagagctcttaaagggacaggacacaccccagtgcctgggtagggacttctcaagagagttgctagtttggaaaattaaagaatggtcagggtgaggtcagtaaaatggtagggaaagggatcaggtagtggataaagagcttgcataccaaacgtgggcccagaagccaagactcaaccaggagatagaatactggagcaagaggaagagactcaggttgacgaagtcaagaagggggccgcgtagacaggaggtgcagggctgagcctgggtcaggggcccctggatagatgagagaggaggaggaggaggaggaggaagaggaggaggagtcaggagagccggctggaaggaagccaaggcaggagcaatgccaggatcctggaagaaggaggatttaggaagtggggggggaggggtgggtcactttacggactgctgctggtcttggaagaggacagcatccctgacagagcaactagtggcagtggctggagaggccgcagccaagagatggataagggcagcagcgggagaccaggcttgttactgccgcttggagctcaaccaaaggggatggcgatgtggaggcattgtagagatgagggccaaaggagcgtagccggattagttaaaggcccagggtgagcggagtgggcagagcactggatctgttcacctcccagcagcccaccctgccaccacacatgcagcatgacatctgccacagagctatgggagactcccagtgactttcagccaccacagggctgcagtagagtcaggaagatggtctcagccaaggctgaaatatagtggagggaaatcagaaggaagtccagggaatgaggatagtgatgtaatcagatccccaggcaagggagggtggagtgggcaccaaggcaggtaggcaatgcgctaatgcaggggttctcaacctgggggtcgagaccccctttagggtcaaccaacccattcacaggggtcacctaagacgatcagaaaacacatatatttaattataactagtaacagtagcaaaattgcagttatgaagtaacaggagaaatcattttatggctggggcgtcaccacaacatggggagctatattaaagggtctgtgcattaggaagatcgaaagccacttctctagtggattggaggccagggactgaagctttgccggggttctggtactagacggagtgatctgggaatccaaaagaggcgtccaggagtaaaatctgttgaagatggaggggtgtaagaactcagaggaaggggatgacgtaagtccaggggtctgtggggtgagggagaagcacagaggccgacagctcagtcaactctgggacagcctgggacagcctggatctccacaagctcatgaaaggacacacacacacacacacacacacacacgcacgaacccaggaggaatacagttgtgcgacaatggggagtgacctgctgatctataaaggacttcaagatggcaggagtgtgtctgagggcatgaattgatttgtactgtttcatttcttaatttaaaccactctcttatagaattagcaatatcgtgacctgaacgataggtggggggagtgggagacatgaatcagaaaattcctaaggaaatttaatccgtttgggttgtctggggcaatgccttagtcaccgtcacttcgttgtgatgaaatgcctgacgtcagacacgtatgagaaggacttgggagatggctcagtgggtagagtgcttgccacacacggacgggtaaggacttgagtttaatccttagaaccaatgtaaagctgggcacagcagcacagatctgtaatccagggactcttccagttgtgtgagagaggagggaagggagtccgtggcgctcacagggtggcagcctcgtgcacacggtggctagcaagaagagagaaaagnnnnnnnnnnnnnnnnnnnngagagagagagagaaacattttttttaatctagaaaaaaaattatggtttcagaggttttggccatcactgagggcagggtgggaaagaacagagcagttcacattgtgaggtacaggagtagagtagtaacagaaactgccaggggcaagatacaacacacatacacacacacacacacacacacacatacagacagcagtatgtccacacacatgtgaatatgtacacacacacacacaaacacacacagcagtatgcccacacacatgtgaatatgtacacatacacacacacacacacacacacacacacacacacacacacacacacacggccaccaccacacataggcctctttcctccaacaggcccaaggtgctgccacctcccaacactgtggaatctgactccatctgtggactcagccattcatcgaatcagtgttctcatgatccgtctgcagaaatctcctcgacacacctggatgtcaggatcttctgcccgtatctaaatcaaatcaatttcaaagggaagaaatgttataccgggaaacagcctgagctggtgtccttaggctaacacctcaagctcggtggaacagacagagtgggggagggacaggcagacagacaaacagatggacagatggacgggtggatggatggatgaacagagggaaggggtctgaacaggtagtagactgtccaccggctagctctgcacttcttactgctgctagcttaggcagacttcacttagacttggacacctgcatctgagatagatccaggtagccaggcctctgcaggggctttcaatagatgtttatggtttgtagtctgagggaaactgacattcctgccattagagtgcattccttaaactttctgcatgctctgaggtttgatgggagcatgcacgcacctggcctgactgcacctggccatacagaccgtctgtatgctttagaggaagagggacttccccagagtgcctctccctgtatccataaccccccgccccagaagagagacagaggtggccggctttactcgggaccaagactagacccatcatccagagacacttttaaaaaatctgcgattgacacagctttgtaagaaatagttctgctaaatccactctgcttgtttttatttgatctgatgactgctttaaatggaatttttaaaaacacagacatacaaagaatgtctctgcctgtctgtggtgctgttttgatatttctgagggagaaatttgctaaggttcttggaaaccttgagaaagtgtgagggagtggagaatattgttcttctattggtgacgggtgtctttgaaatctgagcaatggcagtggacccttgggaagaaaatgcctcataaggcctgcacacgtgtgtccccttccctgtcccagcaacacaagaaaagttgggagaggggagtaaagtggataggttggtagatgggtacatggatggatcagtaagatgatagatagatagatagatagatagatagatagatagatagatagacagacagacagacagatggataattaggcagttttcatcgctgtgacaagatgcctagacttacttttctgtctttttttccagtcgtgatcagctgactcaccatttctggggtgtagttaaggcagaacaacatcacagagaacatggtgagagaaagctgcacactgcatggcagataggaggaagagagagacagaggaagaggctagagacagaatacacccttcaaagacacagccccaattcctccaatcaggtccttccttctgcttgtccatttaagtgtggatagatccattgatttgatcagcacctacgattacttctctaaagcctcacctttgagattacactggagaccaagccttcaaccatgaggctttggaggatatccaaaccacaacatatgaagaataggtagataatttgattaatagacagactgactgacagacagatggatggatggttgatggctggctagctgacagacagannnnnnnnnnnnnnnnnnnngtgctgccaaatgctgaggcgaggaagggtcttctttcctgtcctgggtcagcattccaggggcacctcttgtagtgcccccttcaagcctgggtattcacgcaaagggtaagctacttgggacccctgccgtagagaaccgccaaatgtaaccacctagctcactgcccagtaaggaggaaaatgtagtctcccactgtcttagtcagggtttctattcctgcacaaacatcatgaccaagaagcaagttggggaggagagggtttattcagcttacacttccacactgctgttcatcaccaaaggaagtcaggactggaactcacacagggtagggacttggaggcaggagctgatgcagaggccatggaggaatgctgcttactggcttgctccccctggtttgctctcggcttgctttcttagagaacccaagactaccagcccagggatggcaccacccacaaagagccctccccgattgatcgctaattgagaaagtgccttacagctggatctcatggaggcatttcctcaagggaggctcctttctttgtgataactccagcttgtgtcaagttgacacacaaaaccagccagtacatccagctctttagaaaccagaatgaagcccagatcaggagtcagcctgggacatcctttattattttttttcaaatttttctccttcatctccttcttaatattcatttatatattttatgtatatgagaacactgtagctgtctttagacacaccagaagagggcatcagatcctattacagatggtcgtgagccaccgcgtggttactgggaatcaaactcaggacctctggaagagcagaggtcagtactcctaactgctgagccatctctgcagcccagcctgggacagccttatgtagcaggagtcccctgccccatcccactgggctctgggggcagaatagagtcccctgcagttttccttagagtccttgatgttctaaagccacaagtatatgggctcctaagcaactatcctctgaaggacctgggaggttttggaattgggagtgtgtaaaagctcaccttcctggaacttcttctcccgtgctggtgaccgtctcagccaggacggctactacacgcaattgagaagcccacagccggggctcatttgtttcttttatttgttgaagcaaagttgcagggttttttgtttgggttttttgctttgtactatcagatggtttagtagatttaagtgcaagcattgagggagctagagagtgcccttaaagggacagaacacaccccagtgtctaagtggggacttctcaagagagttgctagtttggaaaattaaagaatggtcagggtgaggtcagtaaaatggtagggaaagggatcaggtagtagataaggagcttgcataccaaacgtgggcccagaaaccaagactcaaccaggagatagaatactggagcaagaggaagagactcaggttgatgaagccaagaagggggccgtgtagacaggaggtgcagggctgagcctgggtcaggggcccctggatagatgagagaggaggaggaggagtcaggagagccggctggaaggaagccaaggcaggagcaatgccaggatcctggaagaaggagaatttaggaagtggggggaaggggtgggtcactttagggactgctgctggtcttggaagaggacagcatccctgacagagcaactagtggcagtggctggagaggccgcagcgaagagatggataagggcagcagcgggagaccaggcttgttactgccgcttggagctcaaccaaaggggatggcgatgtggaggcattgtagagatgagggccaaaggagcgtagccggattagttaaaggcccagggtgagcggagtgggcagagcactggatctgttcacctcccagcagcccaccctgccaccacacatgcagcatgacatctgccacagagctatgggagactcccagtgactttcagccaccacagggctgcagtagagtcaggaagatggtctcagccaaggctgaaatatagtggagggaaatcagaaggaagtccagggaatgaggatagtaatgtaatcagatccccaggcaagggagggtggagtggnnnnnnnnnnnnnnnnnnnntatgaagaataggtagataatttgattaatagacagacagactgacagacagatggatggatggttgatggatggatggctggatagatggatggatggacagatagacagataaatagatggatagatgatgcaatagttgatgtcaaattgagtctagaatcacttgagagacaggcatctaggcatgcctatgagggatgtgggaaatgaaagatatggagaagcccattgtgattgtgggcaggaccattccctgggcaagaggtcctaaactagacaaagcagagagaatgagacaagcacaaacacaagtccactgctctctgttctttaccatggcgtgataggaccagctgcttcacgctccagtcacctgacctctccaccatgacaggctgtacttctaaactatgaacaagaggggaccctctcctgggggatgctcttgtcagagagtttttatcacagcggaaaaagtaatgaaagcaaatgagcaactgtatacgtgagtagcatcccagctcttccctaataccacatttaaaatcccacccgttgccaacaacattacaagccttttctcttgcacaaatgtggtgtccacacacagatacacacattctacacataaattgttaaagattgaagacttaaaaaaaaaaaaagaaaaagaatgcttattttctaatggattctgagtccccgaagtcacttcttaaaagttttccttggggccgaagagatggctcagaggttaaaagcattggctgctctttcagaggactggagttcagtcccctggtggtagctcatacattatctgtaactccagccccaagggacacagtgccctcttccagcttctgcaggcaccattcatcgtgtatacacatacacatgatcacacaaaatattcatacacgtaagataattttttaattaaaaaatgctgtcctcactccatccttagttaggagaaggacttggctttgctctgcgtgtgggaaattgagccatagacttggtaagcagtacagcactcactcttcctggccctggaggctcaccccgcccactttcttcttgttcccagctgtaatggatagagtgtcgagtggttaaggtatggagagagaattaggactcaatcttattagctcttggccctttttaggggaggtggggatgctgtggtcggaaatgcttggcgcctctgatgttggtaggcaatcaggttatattcatcagaacagcattcacaaccagccaaaccggggcacaaagatgttttaagataactcaaggtagcatttattttttcgggcatggttgtaggctctgaaacaaagtgataaacagaaccagccatgagctgtgccttgccagctcttgctttctggtaggaaggatggaaaataggggactagaaagcaggcattggtatgaaggaagaaggagaaggaagccggggctgttggaaggaggccttggagggaagatctgaaggccacgagagtgaggttacttagaaaagagtatcccatgcagtgggaatgaccaaagctgagctctggggtcagggtgtagaccacagtcaggcagagggcagtctggtagttgcctagcacagaggagatatggccagtgagctgggcatcagggcctccttaaaagcctagagagaactctgtcagtttgaaatgcagtagagtgtcccagcacatggaccttcataaaaccttgtggatagtttaaagtctgccccccccctctctctccctttttattttgagataatcttaaaagttcctatcttttacaccatgacctcaattgttaatatagcacatttactctgcctctcaatatatacttgtatatttaatacacacacatttattgcttgtaaaagaataagaagaagaacagacacacccatacatacatactcccaataggatctgtacagctgttagtctctttcatctctttcacatcatctttcacaatgcagtatctaagcggctggaaaatgggaagtctggtatggcttgtgcttccagaaccctgtcccacgtgcttggttggcttcatgcttctgggcctggagtgaagaagagaacatcccagcagaaggcatcaccagaggagagttactgtcttcctggcagtcaggaagcagagagagaaagagagagagagagagagagagagagagagagacagagacagagacagagacagagacagagacagagagacagagagagagacagagagagagacacagagacacagagagagacagagacagacagacagagacagacagagacagagacagagagatacagagagagagggggagacagacagacagacagacagagacaggaggggaccagaacaaggtgtcttctcaggcaccacccccagggagttacttcctctaacagatcacacctcccaggattaccattgtagtgtgtctaccaggcaattatccatcaggtcagggcctcagaagccagttgcctctcagcaaagagagacggctgggggcccagtcttcaacttttgagtgtttgaggaagatacttcatatccaaaccataacaataacaaaacaaacaacagaaaaaccaaatctggttagaacactgaaaccaaagctgaacattgcatttagaatcagccaccttatctatctatctatctatctatctatctatctatctatctatctatctatctacctacctacctatctatgtatctatctacctacctacctatgtatctatgtatgtatgtgtatctatctatgtatctatgtatctgtctgtctgtatgtatgtatgtatctgtctgtctgcctgtctgtctgtctgtctgtctgtctgtctctttgagttaatggcccttggctcgttctaacacttttttgatgatatattccttgtcaagctgcttaatgctactgtgccccaggatccacatgtgccaaatgaagaaaataaaagcatctagggggcttgagaaccaaatgttaatgggttgacaggtttagcagaagccctgattctgctcagaaagcctcgttgttcttgtgtttagtccgtgactatgcatgctgcaagtagcctccaactgtcttcctccctcccacccttctttccctactttctcccttctttgattcctggcacctacacaggagttttaaattttgatgtggtttgaacttgtcctgggggttttagtcaacttagaactgttcccaggaatagttttttatgtggttgttgataagtctctcctaactcctcttatggtatccaggtatggtggcacacactgtgaccccagttcttcgatggtgaagttaggaggatctgtattttgaggccagtctgcactacatgagctctttgaaaaaaaaaaaaagaacacttgccatgtgctaaggtctcactatgtgctaattgtttgtgtgtgtgtgtgattttgttcctctatcaactcaacatatggtggagtggtttgagtgtaaaatatcctccacttggtccccgccttctgttgtctgggggatatgggatcattagaaggtggagacttgctagaggatgtgcctcactgagctggcctggagatttagtagcctgaccccacttcctgctcaccctctgcttcctggtcctctgagatgggaagagtcccagccttagctcccatgctcgactccatggggatgaacagcacaccctaaagctgagagctagaacaaatccttcctctccaaattgctttgtcagcaatggtcggagtgaagaggaaagtagttaatacttgggccctgaccctgccagtcatcagtgttgatgttgggtggggctagtctgaggaagcctttgacactgaaaagtgggcatttgtatcttcactatccctgccctactctaagccttgaccttcctcctcctgctccttctactcctcctctccctcctcctcttcctcccagtgctcactgccacatggacaaccccgtccttcccaaactttgctaaaagggtatagcacatcacgggatgcaaatgactggtaactgactataactgtttgaattgtgcagtgtcttttaatgtacagtaaagaacagggagtgatgggataaactcttaagttcagaataaacatttacattccaagtgtttgtcaagtctttaaccctgtgtcctattcattccacgctttaaaattaagatataaattacaatatgtggaaggtctaaagccacagttgcacacgtatgtgcattattcccacgtgtaccattccccacatgtcctggctctttttctggatgcccttggccaggaggatggcaccccaagcccctagacagccttcatagtcgggaggtacaagatatgggcccctttgccctgaaggacagatgatccatgagcaagatttcaggcttgtgactgagtgtttgagaggaaggggcctcatctgctccagaatcaccccaacagatttagctagtttttggggtgcctaccagagctttccagacagcatctcagagggacaaaaggaaacaggcaatgcatggtattacaggagaggaaagaaaatgttatggttggcacccagccattggctgaaggagttttggaggggagttccccaggactttggggatcagggagaggcatgtgtccccatgaacaggcagccttgtaggaatgataccccaggcttctgcacaggtagaccattcaagaagtccctcaagcccagtgggtgatcaggtgattgttcatgcttggtagctccctcgggtgttagggtgatgttcagatagaaccactgtctctttcctactaggccttgggcttgtgtgggactcgctggttctgatggttctacaggctcagtcactgtgttccccttcccctacatggaacactcactttctgctgcttggccccaagctctacatcccaacctcatttccaactcaactgttattaaaaaacatggaacctggccctgacccactactcactgggccaggtctgcatctctagccactctactctggtgctgcctggctctgtccatggggaaaatggtgctgacttctatggcctgacatcagtagtatccctccaagctaccctttgtctgtctctgttttgattctgccaagctctttctttgggaaccctcagtgtgtgcttgtgggctacccgtctccttccctccgaagcccccgtgggtatcctgctcttcctcatttctgtcagacatcctcatccccttttgtactgccgctggcaaatgctctgttaggagttgctcagaagtgacttggtgggcacaacagagctatcttgctaggcctgggacagctcaccaggtggcgggctagcacacagatgtgtgtggcaccttccttggaaggagctgcactcaccagcaagtcaccactctatgggatgtcacacccacgctgttcagcagtgtctaggattcctagaaagagagacactagcaatcgccttcctcctctgctgtgtccttgcatggctccagggattcccatatggctgggatagagaacgagtgacagacagatggacacacagacacaaagctaaggttaggggtctgggctctcagatggagaaacctcagcaccccatggaagtccaccatgtttattatatagatttgaacagagcggcaagattattgctgaacaaagaggtggggttattatatacattatggtatacagctggaccaaggagatgcctttggtttaccacagtaggagcaacctcagtagaggagcagtgttcaggctgtaaacatccagcagggggagctatgacaaatactttaggcatatatggtcaacactcaacactagtcccccaaggaaggcttggccatccctttaggcctaaggctgtagggtccttggcatggcttagcctatatcaacaacacacattcactcggcttcactcagggcttccttcagagcctacactccttggttatacccacgctgacagcctcgggtggattccacccaggagaggagttgtgccaatatgtaaagcaaagacatgctcttataatgttttaaacatgatatacatacacatatcacatgtggatgtatgtatgtcttccctgaatatgtatgtgcacatacttacatgtgtatatatacttattcataatgtatatctatgtatgtcttcacatatattactttttgctttttgaaattattgtagactcgtagggaacgtgaggcagtagttccaagtgtcccctatcacccaccttcccctggtatgaacgtcttacataaccatgttgcgaggatcacagtgaagacactaacagggatccatgtgatactgattgtctagaataactcggcgtcatgtttggctgactttaggatgtagttggaacgtcactgttttgtgaacttggcttccccgggcatatacccagggactaccttggacctacaggtcacagcgatgggtttgccatcagcatgccaagtcggatttcctaatgggtctgcagggaggcaggcggagtgagggtgagcttgtgtgctgctgtcactaacccttcttttctgcctgcagtggacggctgactgcagagagcagctggatggtagctgttccttctccagagggcgagccccgccacagcaggtagggaaccagctctgtgccccatctacgagctgtcacatgtcctgcttttctgggaccttgggccgactcttgggtgactttcctaaaggatggggattaggagtaagcagaaagatgggtgcaggaaggtaggggcctctaggaagcctcccttagttcccgtgccgccttggagttgcccccaccacaacacatgggctctgaagtggctctgaagtgtatcattttatggaatgatacacatttggcaaaacctagatggcggctgagaggagggtggtgagatcgccttgtgtggtgacttatcctttcgggatactgtgtggcgacaggtgaacaaactagagtttggctcctggccttatgggcccacaagcactgggtttcttgggatttttggacctgacagtatattttgaagatcctttttctgggtctgtggaagggctgggtcagtagagcctgtggaaaaggagcttaaaggtctggcgtctccagtctatagctctcccggcatttggggctctctcctgccctgggaattctgacactgcgagtgtgtgtgacccacccagaggtcctgcggggctgtgtggcctagagggaatggagtaagttattcctggtcacctgggtgtcctacctccccagctggtctcagagatacctgtccctgcctgtgaaaaaccatgaggttaggagctgaagaaaccacttgccccaaccacgccccacttcagactctatacctcctgatcctgtcgtttcagggacatgttgcctagctcactagcttggtcccacctcagttccttgtgctacttagaagttacccgtcgctggggatgcagctcagtggtcgagcatctgcttagcatgggcagcttctaccctagcacggagaggataaaaaaatcaaaacaacgcgccccatctctaacctgttccaaaggaagatgcttagtgtccttggtccgggattatccctagggtgcatggctttgctgcatcttgtctctcccaagctgtggggaagacagctatcttcaccgttccctcttataacatttgggtcattgtttctgtctcggttgggggtttctgttgctatgataaacaccatggctaaaagtaacttgggcaggaagggatttaattcatcttacatgtctatatacagaaatatatagaaatattccttccttccttcactgagggaagtctgggcaggaactcaagccaagcaggaacctggaggcaggaaccaaggcagagataggagagggacactgctcattggcttactcagccttctgtcttacacaactcagggttacatgaccaggattagcaccacccacagtaggctgccccccccaatcaatcattaatcaagaaaatgcccaacagacttgcctataggctgatcttaggaaggcatacctacaactaagagttcctcctcccaaatgactataggtggtgtcaagttgccatgaaactaatcagcagcttatttttacaatatttatgttgattgtacagtgtttgatttgattatgacctttccactcctgcatattaaaccgtggagctgcagctctgtggcagaggggaggcagaagcctagattctggcttctcttttgctaataaacatagtggccaaattcttcctcctcagatggaaaccagaggatcctgaatgccccctgggcgtctttttttggcacctctgccccatttgcagaggggtaaactgagcacacaaagaaggaggccttgtctgagctagactgtgcaccttgcaccccagtctcttgtctgtgcttctgcggcccctgtgcagctcatgtacttcccagggaatctctgtcaccttggcctaagcgtcacagctcagtggctccgtctccagtgtctgctgtcatccccggctcttctaacagagatgacaggcttagatgtggctccaagcaggggtggggagctagacaataagaaatgcatgtttcttggtcagtaggtatctagttctggaattttccagggtaggatccttcattttcttttgtttaccaccttccctgaggctcctctctctgcctttgccctctcatcctttcgctctagaggctggggatggccctgcatggggagtcaagagtgcctggcagtaccttgtgccagtgtcagaaggcatgatgtagacttgggggacgagtgacacagggcagaaacacgggatggaagtcactgtcttcttttccctgacccaggtaggtatttagagcagtctagctattctgcaaggtcaggttggctccagcctcctctctgcttggtttgctattcttgggcatggcactcttctataacccgtgctatcccctgccatctctatcccccaccagcaggagtgccacccttcatctcatccctagaatcttgtctctcctcttggagccgccatcatgagaagactttagtacaaccaatttaaacttagctctgactagcttacaaatgaatgaaactcaggctttggctattttatttgacaattactggggaatgcggggggggggtaacccctagtctacttttctcctggcctggctaccctgtcagctgtgaggtagaccttctggtacagacttgagcattataatatatagcaacagaccaaaccacaacagaagacctctaggaaggggttagagcccatcacaaaaagccccaggtagctggcctgtggctgcccttcctggtcttggagctttggtggagaggggagcatcagctaggcatgggtatccaccctgcattagcacacccaaattcctccttactgtacttactatgtaagcaaacaccctcacactaactcatgtcaccctcaagctgttccctaaaccccacctgccccgtcagccaagcaaccccaagaaaagatgtgtcactgactctcatgtcccaagcctctaccatggggccttgcatgcactgggctcagtaacagtgctgaccctgcctggaactggccaaggctcagctatgcaagcattcccagagataccctttccttagacctcacagagtctgagctttctggagttagggttacctgggttgctgtaaacacccagttgacagttactgctaagagcaagctcctcctctgactgctgccacacctggaccactggtaccaagaaagcagaggtcatcaggagccggtgaggatggagcagggagagtgggcttacccaggcaagcatggcattgcctgaccctgaaccagaagctaggggtgggtggcacccatggggctcagccattctttgcttatttcaactcattccaaacaataccttgctctctctgggatgccttcaggcaagtcagggatagcccgcatcccataaagtgggaggaagggagtccagactaagaaaaaaaaaaaaaaaaaggagccaaccaagtgccagaaaccaggattcaaccatatctggcagtttgtcaccctgcctcctctttccactagtcattctgtgaagatgatgggacatgtcctggctgtcaccacaatggggaaacacacggtgatagctgagaggacagctcctgacaagagagaccaggggcagtgcattcagagaccttgaccatgtgcaacctggagggggtcggcaccatctgctctcacatgccaagggaaggaaataagagtataaaaagagcaacagagcttctgtctagactttagaaagccttcctgaggatttggtggcccctgacagttggctctcacgacaatggtatcattgctgggaacctgatcgacataccttcttatcagatggttgacagttcctgaagccctgggaaatctgggggagtatgagaaatgatgtcaagctatggctgatgtcccataatcccactttttctggaatgatgggtgtggtgtaggacatcccgatatgagagggaaagagccttgccctgaggtgaccctggagtaacactgttctatttacctcttccaccaataagacattggcataggtctgggtttctgtgccaacctgcaagctggtgcaaccctgacagactcaaaggatggcagatggcatctaggaggacatcaaacactccagtcccctggccctgacaacgggcagacgaaacttcatctggctaatatccagcaatggcagagtgtggtttgttgacagttaaggaattgttagtacacgtgataccttagtaaaagcacctggttccttaaatgtgtctgtgtggtagggaaaagtcctcaccaagttcgtatattgctctctgtggaattggtacttactgagcgatactggatgcttggccagagtatagctgctggagtcctctgtgtcatcgcctgcttgtaaagagtgaactcaagatgtgtacctgaggtaccctcaacagactattgtcattctaaagaatggccctgtcagtctccgggaaggacatgagaatcgatcccttcctttgggaatatgtaaagtgctccggtagatggaaagggggaaaagtggagaagggaagattagcaaaaatggagttgggcattgtattggagtgctggggtggtaggagcaagcacagctagcaaagatggctcgtgctgggtagtactagctagaggggctgatcatgatgcacgcagaggtatctggtaggctgagatgttggaactgttgtccaatcttgtcaacaaattatcttatgtttttctctgatgtgaagtcagtgccttgtgtcggtcagtacagacaagatgctgtgtaacaagcaatcccaagtcttagtaacttcaaacagcccactggaacccagctggagggtgcagttgcctttttctgagttaggatgtcactatagaaccaggctggtctaaaactcatgatcctcctgcctcagccttctaagtgctgggatcataggcatgtgccaccatgcctagcttcatagctaccacttttacccatcagcacttggagaaaagagctcagaggatcttgctttggtggcttatgccgcaggccaggtgcaccatccatttggctgtgagctgtacacagcccagcctttgaatgcgaagctctcattgccgaagaataccctttgtcgtgcctttgcttcagtgcttggtttcccacctgttgtcttcctcatagagctggtgtgtcggcaagctagctgacacaaagtttgaagtagaattccgtctcataacaggaaagcatcctcatttccatcagaaagccatttgtcatagcaggaatcagaagattctgaacagtgacagagattggtgactaatgccaaccctgagatgctcagtcaaccttcatcaaaattaaacgtgtgccctggaaaagatcacacagagaggctgaagcggtgaaccctaggcagagagtgtgtgcacagcccacatctgaccaagggcttgtagggtggagaaggaactctcagaacacattagttatcccatgagaaaggcttgaaatacatgaagagatgtttccattgaggaactgcagacaggaactgagcgtacagaagacccaccccaccccaccccaactagccctcagagaaatgcaaaccaacccgtgtgacattaccgtgctctaacagctggcgaggatgcacaggtgggggatatacaacacagccattccacatgtttgtcggtttcattaaaagaaagaaaatgaagcctttgagaaccctgtgatccagcccgtgcattcctgagtgtttgtcccagaaaaatgaaggcttatatttacactaaaacctgccctcaagtttgtggcagctttaccagagtgggaacctgagagcaccctgtgttgtctagtcttatgtcaacttgacacaagctagagtcatctgaaaggagcgagcctcaattgagaagatactccataagatctggctgtaaggcattttcttaattagtgattgatgggcaagagtctactccgttgtggacggttctatccctgggctcttggtcctgggttctacaagacaacaggctgatcaagccagttagcagtgttctcccatgacctctacttcagctgctgcccccaggttcctgcccagcttgagttcctgccctggcttcctttgatggtgaacttttgtgattgtgtaacatgaataagccctttcctctcccaacttttggccatgatgtttcatcacagcaaaagtaaccctaagagacaacccaactgttgttcttcagtgggcgagcagtcagtggtaagtggcctgtggctacgacaaagccctgggtgaatctcctgatcatgctgtgtgggaaaatcctagtcccctacggctgcacactccgagattccatgtctgtaatgttatggatgtgagaggtagttgttaagtattggagaggaagtagagtattggaaggatagggtccggtgtggccagaaagggagccacagagggagccctgtagtgatcttccctggctgaatcagtgtcagtatcttgaaggtgacaccgagttatatttttatgcatttctccatggagggaagatggagtctgtttgtattatttcttacaagcctatgccaatgtatatttcttacaagttcaaacagccgtttaaacacagcttacctttttaaagtatagagagctctgtttcttcagaatcttttgtggcgtgtcagcattgctagccgttaggaaaatgcaagctaaacccacaccgagatattatcatgctcctctcagagtggccaaggcaagtggagattctcaaagtcgggaagaagagatttggcacccgctctctccctgccagccctgggctcacctgttttaagtagacccaggctgtctgatctccattccctctgtggtttgaggctgatgctactaggagagatgcagaccagggtggagttaaagaggacttccttattcaaggaggcatattgtagggttggatggcgttgggtacagctgggaaccagggacagtaggccctattgtttcggtggagtcccgacagataactgtctaggagtggcttgtgagatggctcagcctggggtagactcagctagcacaacccacttaaagcctcagtcgcgtgcccagtcaacagatagtaactgggagggctggcctagaaggaataccttggccatgggcttcagcctgtctccacctctccctgccctttgagtggaaaaggagcaaagagagatgggcagagaggcagaaggtccgaagtgaaaggactgggtgctccttttcctcagcccagctctgattccctgctttggtcatccctgctcagcccttctccggcctcaaaggcacctctgttgtgagtattgaacatgcctggttcttttgcactggcatttgagtgctgtcctttgtgtgtgtgtgtgtgtgtgtgtgtgtgtgtgtgtgtgtgtgtgtgtgtgtggtcgcattctgcatcaagagcagaatgggctgagacggaaaggctgtgagctgctaactcacgggactgcacgtgtttctctgtagtgccgggtaccagggtctgtctgtgcagccaagcttctggctatctgacgctgccacaacactcatgagcatccagggccagggctgggtctgagggcttcccccattctgtgtgcaacagatatgctggtgaatcctataggcacacctcccaagtctctggttagagcattgccttcagcattcctggtcttaggagcatcctcctggtgtcctgtgccctgttcagccaggctctgccagatctccaaatgtgcagcctgggcttctcatcacttcccacccccactatccataaacacaacttgccacatgctgggtattcaagagagagctagcccagtggcactccactgctcatgggcctcactcctttgatctcctgtgcacacccttccatgccccaactcctaataagctgctgctacacactgacattttcataatttgctaattcagcatgtcccagatgtttgataaggagcctttttgactaccctacctctatagttccttcagagcccaaagaaataaggaccagtttctaaaggtgtgttctggaccactccatggactacattcgaactaccagcactaccctccagtgctgttctgatgcccgctagcatctgaaagcctgggagcaccccagggagctgtgtcgggggagcacctcagggagctgtgtggggagcaacccagggagctgtgccagggagtacctcagggagctgtgtggagagcaccccagggaagctgtgcctgggagcaccccagggagctgtgtcggggagcacctcagggagctgtgtggggagcaccccagggagctgtgccggggagcacctcagggagctgtgtggagagcaccccagggagctgtgtcggggagcacctcagggagctgtgcagggagcaccccagggagctgtgcggggagcaccccagggagctgtgccggggagcaccccagggagctgtgtggagagcaccccagggagctgtgccggggagcacctcagggagctgtgtggggagcaccccagggagctgtgccggggagcacctcagggagctgtgtggggagcaccccagggagctgtgccagggagcacctcagggagctgtgtggggaacatcccagggagctgtgccagggagcacctcagggagctgtgtggggagcaccccagggagctgtgccagggagcacctcagggagctgtgtggggagcaccccagggagctatgccggggagcacctcagggagttgtgccggggagcacctcagggagctgtgccggggagcacctcagggagctgttcagggagcacctcagggagctgttcagggagcaccccagggagctgtgtggagagcaccccagggagctgtaccggggcatctcagggagctgtgctggggagcaccccagggagctgtgccggggagcacctcagggagctgttcggggagcaccccagggagctgtgccaaggagcatctcagggagctgtgtggagaacaccccagggagctgtaccggggcatctcagggagctgtgctggggagcacctcagggagctatgcagggagcatttaggaaggggtcagtccccactctgaggcaggtgctgcagttctgtgcacagtgtctaaaggtctggacccacagctactcagcaagctgcagtgccgcagaactgctgagctggacccatcagagggaagacgatgctcttgtgctggaagggttgtgtagaggaagtgctcccctgtgtctctgagtgtcgggaagggtactctgtggcagagaggaaggcagtcccgtgcattcttcagcccagagtaacctctgagctgccacaaacaggatgcagtccaagccacacagcatcctttcctgttacccatgtggcagtggggaaactgagactcccataacaggagtctagaggactgcagggttaggatgtgctgggatgagctccttcgtctctgtccccagtgtgacagtcacttctctgtgcaagtcctggaatagcattgggatggcagctggctcttggtatggtgtcccagaagtcagttagccagtggagtctgtctgcagcccccaccactgtgcacttctttgatgtctgtgagaggactgaacagatgatgtatgtatacgtgtatctatgtatagtgtgtgtactgtgtatacatatgacatatggtgggtatccatatggtgtatgatgtgtgtatgtgtggtgtataagtatgacatgtgttattcatatgtatgttgtatgtggtatgcatgtatatggtatgtggtataatatgtatggtacacagtatgcatatatgtggtatatgtagtatatttttgtatggtatgtgtgtatgtatagtgtgtgtgtgtgtgcatgtgttgtgtgtgatagtgtatggtgtgtggcatgtatnnnnnnnnnnnnnnnnnnnnaaaatttattcacacatggttacgctttggggaaattatgaggggatctctcagtgtatagtgtgtgtgtgtgcatgtgttgtgtgtgatagtgtatggtgtgtggcatgtatattctgtgtggtctgtatatgtatggtgcatgataagtatatatatatggtatgtgtggtatctatattatggcatgtgaagtatatatgtatgatatatatgacacgtatatgtgtagtatgtggtgtgtatgtgtatatggtatgtacatgtatggtatatatgcatgtatagagtgtgtatgtatggtatgtaatatgtatggtatgtgtggtgtgtatatatatagatatattgttgcatatgtatatcttagggttactatgactgttatgaaactccatagccaaaagaaacttgaggaggaaaggatgtatttggcttacatttccatattactgttcatcactgaaggaaatcaagacaggaattcaaacagggcaggaacctggaggcaggagctgatgcagaggccatggagggatgctgcttgcttgcttgctccccagggcttgcttagcctgctttcttacagaacccaagacctccagctcagggatggcaccacccacaatgggtgggtcctcccctatcaatcactaattcagaaaataccctacaggcttgcctacagctggatcttatagaagcatttttttcaattgaggttccctcctctctgatgacttttatcttattgtcaagttaacataaaactatccagtattttatacacacacacacacacacacacacacacacacacatacacacacacatacacacacatacacacacacacacacacacacacatatatatacatatatatatatatataaaatgtatagatttggtatgtgtggtttatatatgtataacctgtgtgggaagtgtgtgtgtgtgtgtgtgtgtgtgtgtgtatgatgcatgtggtatgtatatgtatggtgtatatggtagatatgtgtgtgatatggggtggtatctacatatatgtgtgtggtatgtatacatatacaatcatgagtcacatagtgaagtcttagtcagcagcagactacatgtaccacactgggcccgtaaaatcatagtgaaaannnnnnnnnnnnnnnnnnnnnnnnnnnnnnnnnnnnnnnnnnnnnnctgggcccgtaaaatcatagtgaaaaggatttctgttacctagcaacgtcatagccattgttttgtctcacacaaggcatttcccacagcgctgtggcagtgcctttacgttggtactactgtggtgttcaaatcagagcccaggtcatggtgggttctgtgttacagcatgggttcatgctataactgagaacaggtcatccgcacaccagctttgctcctcacacaccagttttgtgggcagggctgtggcccctcctctatgttgtgtcagtagctgcccatatggggatatgcccctttcccctgtcctggaactcactctgtagaccaggctggctttgaactcagaaatccacctgcctctgcctcccaagtgctgggttaaaggcgtgtgccaccacgcccagctcttgggtccgtttctttagtgtcccctcccatttgacttcagtaaccacagcttagttttgctctcctgaaactttatgtaaattacatcttacaaccagtactcctttgtacttctccgcattgtctatggggtttgtttgtgcagttgtcgcttgcgtttgtttattctcactgctgtgtcatagttgaatctgtgaacatagcagctcttctgtgtggtcagctgttggcaggcgtgtgggtggctcctggcccagcattgcctcgacgatgctgctgtattcttgtgtggttgcctctagggatgtctgtacttgtttctgttgtaagtacgtgtttacgcctaggcatgacttctgtgtctccgacttgcacgatgttggacattaggcttgggggaatgatgggggccgtcagaatgaagttgggggttggagggtttgctggagtgaccagcagccagagggcagtgaccacattattgaaatggtactaagtaaagcatttcctgtctatggggtgagccatgtaagatgtctccaaggacacaggccacagtggatgaaagcaggaaatgcagccttgcttggcctggggcttctcaggaggcaaggcttaaatgattcaaaactctactcctgcatggatgcttcagcacgcctggcttattggagcccctagccagggagaaaccactgtcaccagacaggcagtggtggtgaatgccatacagtcatgcagagtgtctgaggcattgagaatgaatctcaggcttcagcagcagagatgggggcatgttgagtcccgaatacatatctccggaaacaccgtctcagtgagggcctgcacttgccacagtgtccaggcctgcagtctccacagtgtcctcctgatgctcctgctacaatattcctttaggtggctccctccagcccctagccatgcaggctagccagccttaggtgtcagcgagggccccagtggccctctcaggcttggacctactgagcctctacctagttgtttccagctggccccataagtaatgccagcccctctctttgtctctttcagaatggcaacaaggacaactccctggacatgctgggcacagatatctgggccgccaatacctttgattccttcaggtaacttcctccttttttgtcagatgtccagggctggtgtgggatctcctgccatgcatcaggacttatggggtggatctggtatggaaacagatgatgaggctggaggggaaggagagactttagcagaggctccaagaaaggaagagccaaagggcagaggtcaaagggaagataggcagactgaaggggagggggagagcagaggagggactggagacaggtgggagcacggaggaaggggcacatggctatagtgggaggcggaggtgtcacccacccacacatacacacacacccttctcaccctccagtcaacagagaagagggactgggctctgtggcccagaggtggtgtctctaaggcatgcatgaggtttgctccttagtaacacacacacagaaggcagactgactggctcagattttagaaggttcctgatggtacttgggattgaccaggctccccaggactggggacttatctctggctcttatcgctcctgctggatagtggccttgggctcatctctgtcccatcccctgagctacccaactctgggctgcctaactacaggctctccatggtgagggtcccaggatggccctgcttaccttatcctgagcaccattttgtgctcaggtgacaggtttttgtccttctcactccaacccttcttaaatgtactcatgaaacaaattgggttgttgttggggacccctacagagtgggcagctagcccacattcgggtttgggaagcatatattttcccacagcagagttgtagaaaggtgaagccctgataccttgagttccaccccaagtggggtctgaacaggtcctccctgcccactgaacctcctggctattgtgtattaagaaggcttcttgccgcatgtcttctatttgtcgccctccctcgccctctagtggtgccacctgggacctgcagcctgaaaagctggacttcacccagttccatcggaaggtccgccacacacccaagcagcccctgccacacatcgacagagaagggtaaggactggggagtaaggggggggagggaagaggtgctcttacatggagagaaataaggtgtggggagggacagggctctgttccaccacacaggggaggtgaacccatgtcctacatgtcctccctgctcagcccaggactgcaagtgtactggcttttctagagaattcctccatcctccccaccagcccatatgcctgctcctgagcagatacaagtgtctcttgtcaagtaaccgcgctcgtgggtcacctactggggcatctgggaggtttccttgaatacatctcagattcagtaggtgtgaggttcctttccctgaagctgtgcccaacctgtgattggtggacagcatgtggcttcatgccgctaaggatagctatgaatggacgcttgattcaaaagtgcacacttccttaagacactatgaggtgtgtgtgtgtgtgtgtgtgtgtgtgtgtgtgtgtacttgtgtacttggtttcaaggcttcagctgtatagacgactttgtcttgcttcagtgtcagatagttagacatatccggtagagactggacattcacacttcacacgagcccctgggatgctgaatgctgacctgcctgctgatgcaggaactccggtttgggaacccgtcccagtgcagactttactggcctgtctcacccttgttggctctgggaaccagtattacctgccttttaaaaggtgatctcagggcctgagctgccctcaggtcacgtatgtagtactagctgggcacaggcatgagacaggtagccattgctgcttttcagggttttttttttttaagtaattttttacagaagtaaagtttatgcaacataaaatcaaccactttaaactgcgatttgacataacagcgtgtttacagcactctgcaattgctgtttcagtcttcttgctgcccccatacaggatggtcacttccagtcataaccccatgtccagcccctcccctagcccctggcaaccaccaatctgctttctgtttctgtgaatttatttatttatttatttctgggtgttgtggaattggaatcatttgtgtcctttctgtctgttgtctttcctctcagtgcttttaaggtttgatcacaagcatccatggaccattcctttttttagctgagtaatactccttcgctacttgatggagttatggagcagctgagtgatactccatggagcagctgagtgatactccatggagtagctgagtgatactccatggagtagctgagtgatactccatggagtagctgagtgatactccatggagtagctgagtgatactccatggagtagctgagtgttactccatggtgccagctactccatggagtagctgagtgatactccatggtgccagctactccaccattgttgactcattcatccactgctgaagatttgggtccttacctttgggcttttataaaacctactgcttgggacattccatcatgagctggatccacttaggtccctctttatggaattgctcagccatgcgggaactctgggtaactttttcaggagctataaagtgttcccaaagctgaatatcatgtaccatcgctcacacttcttatttttcccatcctcggcctcatttgtttcccactttgggactcagttttactgttatgattttatttgctttctctcctgttcctgctgccggctcccgtctccctgttactctaacactaaacataactgacatggtgggatgtcttactgtatgccatgtgtcctctggcagctgctctgccccttcccgtccatagagaccattcctcttggtggcataagaggctctgagtagggacctggagcagcgatggtctcaccctctttaagggccagaataatgaaagacttaaataaaatacccacacaatgaggtaaaaatgagggactctagaaggtaaatactctaaggagcactatggagatatttcctgggcagctcctgtccctcctatgtgtgtcttctgggagaatgcctggtgacaccagtggggaagctgagacttgggaaatgcaggtgaccatggcactttagactgtaagtggcgaatgggtgtatcttagttagggtttactgctgtgaaagacaccatgaccaaagcaagtcttataaagggcaacatttaattggggctggcttacaggttcagaggttcagtccattatcatcaaggtgggaacatggcagcatccaggcaggcttgctgcaggaggaactgagagttctacatcttcatctgaaggctgctggcagaatactggcttccaggcagctaggatgaggggcttaacgcccatgcccacagtgacacacctactccaacagggccacaccttctaacagtgccactccctgggccgagcatatgcacaccatcacttggtacgtcagcttcactcatacataagagcagccccatcatgagcagattgtgggaggtgctgattaaaggctgcacagggaagattgtcctgtgctcaacaacgctgtcccctctaacgccagaagaccaggtcacccccgttcaccagtgcaggtcctccttctctgactaggctcacccaccaacagaagctggctcaactctaggggtggacaccctggccttggacttaccctaccactcaggatttatgagcagtgccctgtggccaccttgtggctaggacagggaactgccccgcccccccaccccccacttagccttgccatgtgaaagatggactccacgtgtccagccgctgcaacctccctcagaagcaagttgccaaggcttcccacagcctgtgttcccatagagggacagaactggagcgagccgttgccttggcaaccccactggcagcagtgactcagctggtctgcagtcactgtctgcctgccacacctgcagcttagtcggaagtttcaccttggccgggcaggctaggggtcagagctggcctctgtacactgcccactgctgacctcagactgcttaggtgaaagggcaaaggccgggcccatacgtgcttgatggagtctgcagtgggctctgagcccaactccatctggtgagttcagttcccaggcgtattttacccacaggagacctttaagagtggtagcagccattccagtggggccagtttccccagtgccttcttcctaacatctacggcctgtgcatggcatacacacagttggtgctttcccaggccagtggcacacagttggtgctttcccaggccagcccatcactgtcatgcagaatgattcgtccaaagacagctgcatgatccagccaggcctttctctgcctccttaatgtggcccagaacacaatgggtgtagtagtcagcgcctgacctttctttttctcaccttacacctgtcacaccctcctcctgccccatctgctccatctccacctgcctgagcctggaccaccccaggtacctcctcggcatgccctctgcttcaacacatactttgctctctagtgaaatgaagcccaaagcccagcttacagtataactgatttgaactcctggctttactgtgcctcccactcaatggcctgtgactttcttcatcgtcccctcaggctgtcctccctcctgccctctgtccatcacctctacaccaccacgcccctctgggttccacagcgccaccttgtgccctggatggggtactggccacagttctattgggctatttcccatcagttccctgcttgttgaaactaggtgccaggctaggcccccagccccatgtagccgtgtctaatgaaagaaaggtctgatggaggccaagttcagctccttgttttttcccacctaagcctttgctggtttggcctgtcagatttttttcatgtctaggtttacacacacacacacacacacacacacacacacacacacacacactgacacaaccaccagacttttggaattcttgtctcatgctgccctctagtggaactcaagctcatagccctaggggatgagtttccaatttactcttacttaccaagacctctagggctctaaggtgcctgtctggagccacatctggcttgttttccttgacaggaaaccagaagcgatggtagacaaatatttaaacaaatgagaaaatgactctggaatttgagttgaagctagaggtgttgtccttggggagagtcagagatgagaaacgtgcctgagactggggcagcctctgatctaggctctgattggtcccctacctgcccctcagccctgtaacagtgtgataacagtaggactggctgctgcagaagggatatacttaccttgtgctttatgttcttatcattttaatccacgaaccaggttatgatttcaggtacttttattattcctgtcccccaaatgaagcaatggaggtttacagagagagtggtttacagaatcccccgggaagggatgcatctggagttcaaactctggcagtctggtgccagcagctgtacccttaagtgggcaaaagagtgagagctttgggcagtgaactgggccagcatccccagtcagcatgcacacccatccacagagaccctgaatacagcacacacaatatagctgagtggctggcgttgccagcctgaagacaaagaaggagaaggaggctgcgctgggtttctgccatctcctgcctacctgtgtgactttgagatggttgtttggtctctctgttcactgattttttttcccttcggtacaatggggccaaatgagccggcatttttaggaattgtgggggttggggtagtcattcgctgggagcttaacagctgggcctagaagggggtatcagtgggttcatctctcaccccccccttcagatgtgtgttgcaggagggctacaggaatccaccctggagccctttccttgctgaaccatcctctcagaactgttctgtcttttgtggtctaggtgtggaaagggaaagctggaagatggagatggtatcagcctgaatgacattgagaaggtcctcccgacctggcaggtaggtcctcagccttctctgcctgggcaagcctgctggtcccttgctccagccaacgatatactacggcatgggccgtaggaacaggtgggtagaatggggactcaccagggaccagctgtgtcactgacaatgattgggacaacccaccttggtaatacaataagaacattcaaggacctgtctcttgagtgaagggacttgggctggccactactctagcttggaagtttttccccttggccggacaccacagcgggtgagcattctatagcgcactcacatgggtggaggatctatagagtgtctagtgtggcttttgaaaaatgagtttgtcctgccagctccagcacccgctgtgattgcctactctgtccttgactgtgtgtccctttcccagaatgggttcgagctctgagacaaggagggctcgctcagcagagctgatgccaataatttgagacttcagaagagacggtaggaacctaactgttccagagatggcacttaaagccatgctacccagggaagggactggagagtggggctcatctcgctccagaatctcttctctgttttaccttcattcacacactttcccatctcatcctggttttttgtcctctttcctctctgccctgccttgagcctgtcactgcgagaggctggggagttcacagtgtggccccagaacttgagtaagggtgggctggcagggtctctttccccaatctctccctgggtttacagagtttcttaaatctggagtttctgtgtttgccatattttgaaatgtgtgtgtgatgtgtgtgtgtgtgtgtgtgtgtgtgtgctgtgtgtgtatgtgatgtgtgtatgtggtgtgtgtgtgatgtgtgtatgcaatgtgtgtgatgtgtatgtgatgtgtgtgtgatgtgtgtgtccctatgtgtatgtatacagagagatgacaaaaaaaggtttccctcagttgccatctcctttattcttggagactgactgtcctagttggctttctattgctgtgataaacatcatgaccaaatgcaacttgggaaggaaagtttatttcagttaacaattctattatgaaggaagttggagcaggaacctgaaatcttgaactgaagcaaaagccatggaggagtgttgctgactggctggctcctcatagcttgctcagcctgctgcagggatgccaccacccacaatgggctaggccttcccacatcagtcatcagtgaagaaaatgctccttcagacctgctcacaggtcagtctgatggagggagttccttcattgaggatccttttcccccagatggcctgagcttttgtcaaactgataaacacaaacaaacaaacaaaccagccagcctatagaccagcctggactagcctcaactaaaccggctcgtctgcaagccccaggttgcctcccatttctacctcccccaggcgggaccatgcagagccatgcccagctttaacacagattctggagtttgaactctgaccctctggctctcacacaggcactttataaccagccactcccagcctgcacatttggaaactgttcagtgtgtgtatcctcctggtccccagtctgggctttcacatgcctgccagccccacttctcgttccccaggacttgcctgaagtctgctcgttttttaaaggtctttccccttctttctttatctggagtaacttctgctgtcctgtcctcagctcactcatcttttcctgtgatgtttaagcatgttaatcccctctggtgtgttttctctttattagaagttaccccggatctatctcttctgcccttccatctctctcgtgttttagcgtgagacgtaacttccggctgatggttgatgtccttccccacttacctatggctagaaccatcccagcctggtttgttcgtttgttttggtagagtctttccgtgtagcccaggtggcttcaaattcacggtgatcctcctgagtgtgtgccaccacacttggcttacaggttgccaatacatcagagtcaagcaaggaaggagctagggaagtggctcgctgggtgaacaagcctgccacgcaagagttcaacccctggaactcacacaaaggtgaaaggaaagaagcacacatgttctgttgcctgagcacccccacacgcaacatcatatacatgcgtacataacacacatacacacatacacacacatgcacacgcacaaacaaataagtaaattctttttccaaaacaactgcaaaaagcgtgtaaggaacaggatgtcttggtgagagaacagaagtgtcttcccttcacagcctcatcccagaaggacaggtcagcattgctctcccgtatgccaagtgctggctgtacagactgagcctgctgcatcatgggaaggcctgctcagctgcaggaccatacagaggaatccatgatttttaaaacactacaggaaattcctacatacaacacagtcagaaacctcaggtcccagctgattctgaccaacgaggctaagccactgcatgggggatctgcatttcctgtaggtctccctagactgatgctgactctgctctctagacgagagttccaggtcccagagaagcagctctgtagggaatggctgttctgagagtttgttacaaccctcgaagcactgcacagctgagggtgcctgcacaagttgtctgttggggctcccaagtgccagctacgcaggccgtggcattggcgtgtgtagggcttcccagcctggagtcacatgaggccatgcaggatgtctgggactcctagcctcagtcactgagagccaatgactggtacgcagtgaccatcaaacactttcactttcaaattgacccagaaggcgctgtgctcaagtaaagaccatggagaccaccgtataagacgggaactcatctccagcttagggaccccaagccactcttggactctccatggcatgtgttgagataaatgaacaccactagaaatccacgagctcccttccctcttgtctagagccaagaagtagataaagggggttagcctgagctcatttcctacccaccttcctcctcaagagaagacagacgctaacgtccctctagctctcttccccaacagctcctcttcccatagaggcccaagttaccgtccagtctcttgacccagcttacctccccagcctctgtcctgggctcagtctaccctccctgcagtgcagttgggccctgtccccatttgccttgatccttcatttctctttgctttccctctgcctggcatccagtttgtgcttgctctaccttataggccttgccttgctgaggtcacctcccctgtgacaccctctctgagacacagggcaagtccaccctcccagtccctcagacctctctcacccctgcaggatggttcctgccccagtgttccttctcattcgcaagtcagacactgcggggcgtgggggaggagctgtaactatatgtccttcataacccacgctcaggccatgcacaccttcataatacaaccccagtccttcttgagagaatgtcgttgaagaatgcctttctagagccacaactgtggctatctggggttacaaatcatgggagttttatctgttctgtcgtcgagcccattcccttcacccccacacccctccacactgcccccagctaagagcatcctctctcacttcctgctgatgctcttttgggtgtggtttctgggctatggcttgaaggtctttctatcatctcctgtgttaggattttataggccacaacctaatattaaccccccaaatctcagtggctgctcacacagacacaaatattacgctgagggatctaaatgtccccgagttgcctccttggggattcagggatccagtcagactctgtatgtagttttgccaccccaagggtatctaggtagccctggcagaaatagagaaaggggttcatgccctgggtcttaaatatttggtcccagaagaatcgcctggacagagttagtcacatgactccactcaactgtaaagcaatggtggggcaaggggcaggcagtgctgctcagtgtgtgcaggcgcctccaccgatcatcctctctcctcactcaactaaccttctagggcaggttctctgagccagccttttagagagaatggcatttgttcctcaggaagggcatggtcccttcaaggaagcgacaggagtaacaggccgaatgccctgttgttagagctgtaagtgccgaacagacgctggcaccttgcccaggtcacagtccctaagggtaaaagtctgtgtcctctcccaacaggcgccaccttccttcctaagctgctgtactttccaaagccttggggctccagctcagagcagaggaccccagtggccccaggcttaatgactgtggcagttctcctgggaacactggggcagggtgggtgtggcagggtgtgtgtcctcagttggagatcagatttgtcagtggccccccctggtctagcctctgtagacaaagcccagaaccctaccccttggcaatcctacctgggtgtattttcagcaagcagtggaccctagggacaatccctcttagtgccaaccatagaaattcccattgctggggctattgaggcctgtgagcctaggccctcagagatacttgtggccttggagtaagcaggtgtccatgtccagagatcacacctgcatctctaggaatcccagctataagaaagcctccccacccacaaatagcatttagtaagggccaatgtaggtgaggtttggctttgtccttccgtgtgtgtgtgtgtgtgtgtgtgtgtctgtgtgttttctgtggaggccagaggaccacctcaggtgacattcctcaggtactccttctgcttcctttgggacagggtctctcataagcttggggcatgacagctagactggctggccagtgagtcctgggaatcctcatgtctctctcctcaaagctgggattgcatctaacgtggcttctggggggggggggtgtcaaattcaggtcctcccatttgtgaggcaagcatttcacctactgagccaccttagctggtgatgtaagagtcaccaaggtctgtctccctgtggcagcggcaggggaagaagagtcggacactgggctgggtgaaagcccaaggcaggctttacagcacccactagcacctgctgctctgtgtggttcatgcctgccattgctctctaggacctctggtcaagtagaacatcagaaggcaacatgaactcagggtttagtccattctgggtggtgaaaccatagggcaaggcagagcctggggcccacatggctgggcgaatgttggggtcctgggggactttgatgtgctactgtggcactgcattatgaactgaatggcatggtctgcctgccattttcagtgcagtggacgttcagttaccatcatggagggctgcatgctgctactagagggtgttgatgcaccactctgccactagagagtgttaatgcaccactctgccactagagggtgtcagtgtaccattctgccactagagggcgttgatgcatcactctgccactagagggtgtcagtgtaccattctgccactagagggtgttgatgcatcactctgccactagagggtgtcagtgtgccattctgccactagagggtgttgatgcactactctgccactagagggtatcaatgcattattctgccactagagagtgtcagtgtgccaccctgctgtctccttgtctagctgagtgagaagccctggtccccagcagtcaaagatgtctctacaatctctcctccttatcaatgcctggtaatcagattgtcccaaaacggtcctcctcagatctcagatgagagaagtaaaagaccactcaggaccaaacatgctatgctaagatcaccaggaaccctcagatcacatggctgctacccccaggaggacagtaacacaggcaagaggaccgccttccccgggtgcctaagcatgcagggaatgcagcattgatgtgagttcgagaagctggaaaaacatcagcctctctccttggaaggacaaggactgacgaggctccagaatccaggatctgagccctccaagttcaaattcagggaaggaatgaggcctgctcctcttgcacacccctggcctcacctccgtcccattgctaaaggaagtcccagcctgggcattatcacccccaggtgtgatgacttcaggagccgtttcccttcattgctgtgagtctctgccccatcccaccccacctcagccactttagcagctatcatagagaggtaccaagctgacatgctgtccttctgatctctaatcagcccctagggtctccttcacatttccagggcacagagaggagccttgaagtcctaacttcccctttcctcccctcccccatgctcacttctctgatgccttttgtgccttctgtaaaactccaaaaagactgtgttagttgatgcatctgatgccttgcctaagtttttcctatacaagtgtgtgtgtgtgtgtgtgtgtgtgtgtgtgtgtgtgtgttgttgttgttgttgttgttgttgttgttattgtttttttttgagggtttttggtttgttgttgttttggtgttttggagacaaatctcactgtgtagcccaagctgacttcaaacttacactagctcacctccagtgtgctgggatctatagtcacgtgccactgtgcccagctagggatatgttttgtccctgtcccttggattcttcaccaggcagacggcaatgccatctgtgatttgttaggcaacgggagtgacagtacaccttacttcttcgttttgcatctcggctaggacatttgtaaactaagtcctgcgcctgtcaataattattagttggctctgatctctgtggctgagctggattagggaaactgggccaggctcttactgaacggcctgcataactaagtcaaatggaatgtcttgcctcatggatgtgcccaagacactccctgtggtggaccccaaaaatcccaagggacagtaagtagccttttgacctcgggagaatgtgtccgaagcatttattttccacacaagagaacaagaggagacagaagacacagtagagaatagtaatcagggttaagcacgcagattcgtccctcaccacacatcagatgaagactgggtgggggttatacactcacctcaccccctgggaacctgggggcaaaggcaatgtcaaaatgaaaatcatccacccataaaatgataagcaagggttcccttgattcatctaatacttggcaaagtaaaaactggtgctggggcaggagctgcctctgtcctccagcaggtggcactgttaccgtgtgataacagtggagccctctgccctgcctctgataggtatttgcggctggagtggctgtggccaactcttcagccatccagatgggaaagagtgactgtcattccctagggctgtgttgtcgctcttgcccagtcttctggaaacttccgggatctgtgaactcaggcacaggattagtaaaatatcccaaaatgcctaggcacagaagtcacatgaacaccaagcttcgtacaccccagccctgccccccacccccagccctaagcaatgctgcttctggtcacttcacagtcctgtgggaaaagcagtctgacttctttcattccgtgcacgagaactaactggatacctttgatggactgggttcaaatgcagggcctgggtaccttccctgtagatggtgcatagcattctctagtgtccccccgcagtgagagaccactgatgggtgtgtcgcaatgactaacacttgctaacatgcaccaagtgctttctggaagatacctgcctctttaatttttttaaaaatttattggctttaatctttttcatacaatatattttgatcctattcttaaccctctttactcaacttcatattcatattcatattctctctctctccaaaaggaaaaaaaaagttcacaaaaagacatggagtctgttttgtgttggccagccgctcctgggcatacagcctgccctggagtgtggcagatagatccagtgagactcagttggagaaaatggattttcactctcgtggaggtgccaattgctgggagttttgtctagtttgaacctgggcaggtcctatgtattctgtcacagtctctgtgagttctcatgtgcaatagccctgttgtgtctagaagataccgtttccttggctcttacagtcttccttctgcatagttccctggtccttgaagggaggggtttgatgaagacgtcctatttacagctgaggaggtacttctgactgagttcatttttgcagctgtcttctggtccggtgtcgccttctcagtaaggccttttgagctatgccatccctggcctccctgcctctccctctttatccttcctcttggtgtctgccacacacatgctctattgactgtatgcttctcttcattcacccactagttgttagctgcacgtaaacacagccagagggctcacggttggatgtgaatgagccccgaattgctcttgtccccagggtctcacactcactctgtaccttggtccaggacatttatctctacctcataggtgccatgaatagagcctgtatgtcctgtccctgagttctcaaagcagcctagtgacaggttcgctccatgatcattttatggtcttaccttaggattgtcacagcctggcccatttgctaatgtgaggaagaggcagggattctgcaaaccagttttctggctctaggcagcaaaggatgtgcaagttagaagtgagtgccattccttgattggcacagaggacgtggccgtcttttctgtgtggaaatgggtggagaaaataggaggaaaacacctataacagttttaaggaaggggcaaacatcagacaggtttccaaagctccccctccctgctgactgaagacgagtacctacctacgagagccccctcgcctttccattccacccttccctcagagtctcctcaattaggacaaaaaaaaaaaaaaaccaggataaaaataaaggagaccaattcatggcttcctgtctgaggccccaggtagcagggcccatggggaaccatgctagtgagtcgtgcctgttgttattttcacacttgtgagtcttttatagaaacggcagactacttgggagtcgaagacttctggtgctgacaaccaggaagggcccttgggaagaggcaactggcagagcctgaacaggttctcacaggtccttcccttcacactcccatgagaagcagaacacagggagccaggatccaaggtggcactctgatcagaagtgggtagggctggcttctagggggccaaggagcccaccatccttatatgacccacagtaaggccagggcctggcaatcttcagtccacacactaagtctaatcctcttgtccttttgttgttgttgttttgcaagttttattaccctatagcctttgctttctgtttgttcattggctgtgacagcattggtccttgtagagctgtacagccaggtcaccgccctgttgatgccaaacctacagtattttctatccagtcctttagagaagaaggttgcctggaacattaatgggaagaaagccaagacatcccccaccacggagtgtcacacacctcttctaaaatgatcctgtcagggcctccatttcttcagctgcacagtgaggatcatatacctgtgtctggcattgggaaattaggctggagtccaaggtgggagccgcacagagtcggacgggcatttgtaagttgcctttgcaaagtgcttccttaacaggcctggttctgaccagagtgaacacacagggccggcttgacaggcaaggagccattcttggaatagctggggacagaggttctcctggatttctgtggctccctcagactaagttctacaagaatgcctgccgtcagcttactaaaggggctgggagcttctcccaggcacccatatctcccaacaccctgctgactgtcattcctccccaaagctcccctctccttttggaaaccatcctgaataagtcagaccacatctgccctgggagcctccctgggcctcctaaggacttgatgctaggccagttttgagtgtgtctcatgtttcatgactcctggtgtgtttgtgcttcccagaggagggaagccttgaactcggccttggttgtaggggaggggggcggtgtcaggaagaagaggacatggcatcaaggtgaagttggccggtaatggtggagaaaggaggctgtggagagtgggggcggggccttccggaggtggttcctcgagcaccaggatcagttggtgaagggtcaggaccacatggggctcggatgttcttgagtgggatgaaagaaggctttgggaagccatggactggactctgttgagacctcctggaagaagtcactgggaatttctaccgtcatacacagctcccaggttggccattcaggtcaggtcagggtaggaactgtgaatgacagatcttgccaccactggaaaggctatctgctctgtgccctgctttgagccatgcccatagtcctttgatgaattccagaaggttctatcaggcatgagaggatgatcacaaagccagcatggtctagagagcttttgtgagaagtagagtcacaggcctaagggaggccaggctaaacactacctgcttcagggctaatgttatgacaagaacacctgccctcccctgtgctgccctgctggagggtgggtggggcttggtaagaggtggccagcagaggtgccaagcactcattgctgggaacagactatgagttggcccactaggccttacctatggggcacagaggcagtgcatcttctagccaccggtacacgagtctctgctaggagagcatctataacccatggtgggtgggtcaatctcaccatcccctgtggcctcactactcaccttatggcagtttgcaagagctagacacgcacacacgcacacacgcacgcacgcatgcatgcacgaaccactttctggtggatgctactggtggcttgggccagtttgggtaagctaggttgcatgccagtctgctctcacgtctgagacccgccaacggaaggagccctgaagctggggaaggggaaggcgtttggagagtgtgaagtatccattattcccttatgagccaggggcctgcttctggtctccttcctggcagccttaggtttgaaggcggagaagctggttgttttcatttacccaggcttctgtctccaggagcggcagtgggggcggacagggctacgtgctctccagcaggcaggcgtttgtgaatgggccccggctcccaggccagcaccagcgggcggcccccccaggacgcgcagactctcactggcttgatgtcgcttttttctggtgttgcagtagctgggtggaggaagccttcttctggcccaagaacaataccagggtcagcgcagggacctccctcctacaccctcttccttccattgtgagccgctgcacaatcccaggcctctaaggcctgcccagtcagttgggggctggtggtgtcaagtccaggagagttcagcagtgtgtgtgatggtgtggtcacctgagctggggggcttggggaagcatggggccggatcaagcatcttcggatggctaggatgttcctgtgctttgccatgggctgccagcaggatgaagcctgtggatggggcctcttctggctgacccagagagtcagagcacacttcatgcatgtatagagcaaacagggttgccccttcctcgtcactgggatgtacacattaccctaacgtgctccagcccctagctgaacacacactttcctcaactctgcctcgggttctcaaagtggggttctccttcatcagcatcagaattcccctggaaatttacagatttctaactcctgggtttctcttttctctgagtgaactagacgctcaaggttgaacccagctctgtttttacagacttcccaggggaccctcatagatgctggcgttagaacccaggacttctcacatattaaacatgctacaccctattactatatccccagccctcgtacttgtaacatcagaaccaaaaagcaaaacagcaaatgtgagtttgtttggtgggggtggggtggggtggggtgtgtgcagtgttgagacaggatttgggtatatgtagcccaggttggtcttgaagtgttcatattgctgcttcaacttgctggattataaatatgtgccccgtagcaacagctcttaataacttgctgataatttactaagtggttgctataacctaaccctgtctccctccatcagtggctaagattttgattgcttggttgtttttgtttgttttgtgtttgtggggtctttctttcttcctcttcttcatcatcatcatcatcaatttccttaaatgaaggacaaagaatcctgctgtatttgatgacctgggatggagatttgtgaagggttaggggacgcagggaggacccagccccccagtgttctgttattgattgtgttccaaatgactcctaagccttaaagccctggcagagctactagagaccagggcttcccagaggttccttattgtcggcgcagttgaagctcatctcagccgtgcgagcagcagctgggtggagagttggtggcagttggtctatacatggagggaaaccgtgtagctgttctggggagtcccttccttctgctcatgcttcgtatatgcaaatgaaccgtcttccatgtccactggatgaccaccggcagtggaagaagctgttcccaaactcatcgcctgtcagcagaaagtcctgccttcacacaccgagtggcaaacaaaagccaatccgcgagtaaaccagcaaacaaacttctgtctccaaaggaagccatcaggagttgccattaaagaggcctgagctcactgcagaaatcaagtggctggaactgaaactgcccggccttgccctctgagactctgtggtctcacttggtgagcagagggtcttactacagatactcatttcctgtctcctctatccccgccccacctcatttttcataataggctccatcatgcttctgggtccagtttgtcatgagtacatgtgtgcacaaccacacacacacacacacacacacacacacacacacacacacacacacacacacactgtccatagctgaggacttctgaaggaaggacttgtcagatgataaaagcattttatatggttgtgtgttcttcaaagacaaaggttttcccttttggctctaaaaagcttagaagacagctctgtgtagtgcgagtggtgctgcctggttcccacaaacccagacatatgtttctgtcaccgatggaggatctgatgtgccattctgctgcgattcccagaggtccaccagcctggtggggtctggtaaaaggaaaatggcagccacctcatccactgagataagaacggccctgcagcagggctctgaggattcagtgctagatgctcaccaggtccccattgctccgggaaccccagagctgttgtcataagctctatattgagcaatcagtagagcataagccagctttctgccacccatgtggcactgactgatcaggtggcctagcagctcctgtgcctcactgctaaagtgcgcattcaaattaagtgactttgagagctacatccaagttctgtggctccgactggcagttcttcccacctcagagtagtgggtagattctaaagaaggaaggaagaccttgatggccacacttcagcctctaaggctgtggttcccaacctgtgggtctcgacccctttggggaatccaaacctattcacagatgtcacctaaggccatctgaaagcacagatatttacattacaattcataacagtagcaagaatacagttatgaggtagcaaagaaaatagttttatcgttggggtcaccacaacatgaggaactggattaaagggccgcagcattacgaagactgagaaccactactctacagtatatgacccaaagagttgcagccatgtagtcctatttccaacatgctacatggttttgtaaaagttaaataactctaaaaggtgtatgtgttagttttctatcactataacaaaaatacctcataaatcaacttttttaaagcaaagatttattttaactcacagcttaaaacatagtcaactggctccatcgctgtggtaaggaggattgctggaagatgtgtggtgggtcagagccacctcccctctgtgttcttaaatatccctttacctaaacacagccaatggtccaattcaggaggtgaacatcgacagactagatattaatctatagattgtatttgaattttgccagttaacccattcatgccccttatagatgaagtttttatggcatttttttttaaaggagttgggtttttttatctttcgtttgcttggttttgctttgcttttggtttagaacccaatatcatatttggcttttcgttatcgaaaactacacaaagcatatctcttcccttcttccgcgacctcgccattttgcagtgcacagcctagttacttcctagaacgctcatcgctttgggcttgacctgtgattctccatgatcaaacgctcacacactttaaatgaatgccacggaagaggtaccttcaccttcctggtatatcagccaggaagcacagggattgtaggaagtgacgctgagcacctggccaaggcagtgactcccaggactcggcactgtggagtaacattttcccctttgtaattaagtaagtaaggagctatttgaatctgtgtagatacactgtttctgtagtacttttacccaatgaatgaatgaatgaatgaatgaacgaacaaacgaatgatttgtacctaaaacgtcatgctggctagcaaatgattttcctgctttgattttattaactgattttctaccgaaggcaacacctgcccctctcatttatctattcatctatgttggctctgcttttttttaatttgggggattataaatcattgttttgaagcacaagttgtccccaatagtgggagcctcttcaagctggctgccgtgtgtttctgaaatgtcctcatttgtcattgtcttccttccttccttctctgcacaggaggctgacccatcctatctcatgccttctctgccccagtcctagaagctacttctattcacagagatggaggactcattactggatgggttttagaagccaaggctggatatgagttgattatactgtcagggccgatgtggctttgattctctctcctctttcgtatccttcaagtccccctgaagtgaaaactgaattgcctgggtggcgtgtggaggggagtttagggttccatattcagtcatcttaaaacttgcatctactctacttcacgccccacacacccagcccatgaaccccacccctacaaactcagcacatgaaccctgtcccccccccaacaaacccagctcgtgagccccggctcccacaaacccagcctgtgatccctgccttttctggtgccaggtgccttcacgtctcaggtgtccaggttctgccagggtgtcagtcaatactccctctacaggaagccaggcagcacctgccctcactcttccagcttctcctccattcattccgtcctctgaaaattgttacaaatattcttgctctctgtgcttctgtggattttagaacttttctgctagtggatagggaaaagagaacataattgaaagaaatgtacgcagtcaacctgtctgtcatgttcaatacagtctcatttggttggaagctcaagaaagaaatttaagctgggtggtggtggcgcatgcctttaatcccagcactcaggaggcagagacaggtgcatctctgagtttgaggccagcctggtctacagagtgagttccaggaaaaacagggctacccagagaaaccctgtcttaggaagaaagaaagagggaaggagggagggaagaaaagaaggaaggaaggaaggaagaaaagaagaaggaaagggaaggaaggaaaggaaggaaattaaggttctaaagagatatctcagtcagccagccagtcaccttgcaagcatgagaacttgagcttatccacagagagccacagtagaaaacagtcctgtatggtggggtgatctggtgagcccagacagggcaatcttcctggcttacttgccagcccatttaacctactgggcatgttcggtggatagcacctgaggaacatctgaagttgacctcaggtttccctacacaagcacacaactgtgtgagtacacccgacacacatgtacccacacatgtgaacacacacagtcatacccagcacaaggaagggaagtctgaacaggagggcacaagccgtgctcaacaagggcaagtggagcaggtgattgtctgagagtcaggggttgaaatgatctgttttcttaatccagataagaaaactcacctgtggctagagtcccaggcatgttgtcatggggctaaaggataaagggagcagtctaatgtacctgatgaaggccagatgtagggtttggttttttgtttgtttgtttgtttgtttttgcctgttcttcaaaagcttgaggaaaggacacatggacccacagagacacacagatgcactcacgcacgcatgcacacaggaatgcacacaagcacacaacagttttacgaatcagtagaacaacacacaaggcagaatgagagccatcaaccatctgtctgcggtccctgggaagatctaggctatgaccttacaaatgttgagactgaacccaagaactgccaggatacaggtacctagggacccaatgacagtactcttaggattccagccatcccttacctacctttgaacttgacctccttagtagtaagactcctggcagcatgccttgagagtcccgagcactgggttctagtcctaaaacacccctgtcaagggatgaagctctcaactgatgctctctccatactgaacccaggaaatcaccagataggtgttagaggaagtgagcaaactgactgtaaagaatttaggagagcgccgccaccccagaaaagctactctcgcagattcccaggcctggggacatcactagcctcttccacggccacctgggactctccccatcggtgtcactaagaaacatggtccctacccatccccgtgggcggcctggccccagaaggcctcatctaaagtgcaagctgccctgagaaccacatgtgtagaacttctaataactttagtcttcctacttgagagttcctcccatctggaaatgtttaaatgagccaggatacccttaagtcagattggcgatctaccctggaataacacgtcataacctagtgctcggggcagtcacctgagaacttgaggtgctgacagaggactcttaagtagccggaagggcaaggactatgggaatggccctagttcctgaaaatacttcatttccagctagttgcttggaagggtttgacctatgaacgttgtcatctgggatgttggtatgtgagctggaaacgtgttaggctaggttggcctatatggattggagaggaagggctaagggtaggaagtcaaggctgagtacctggacaagctgcagagaacatggagaacttggctaccccagcctggtggccaggcaaaggagcggctgttgctctgccgtgtagtgaagaggtgacatttttttagacgtgcatcctgaagacagtctggccattagcactcttagcacatcatctaaagaaggaaacagggctctaataagtaagggctgtccccaagaccacacagctagtctgcgcacagatttggggcccggggtctctgctccactatgtctctcaaacagcgtaccatttcatttatgattctagatgtatggtcgttgaaaggggctcacaggacatctgtttaataattcattctagaatttctgagggatcgtgatcaagtaggtgcctttgaaaagatttcagcacataaaatgttccgtagagaggaaagcaaggggggaaaaaaaagacagggaaaaaaatctcgctgtcacctctgcaagtttcccctctctccgtgaaccgggtaccgccctgcgcatgagccccaagcgcaaatactaaggggagccgctgacaggcagtccccacccgaaaccagggtctccctgggacccctccttaggtctcatgtgctgagggctcacacagaaggtcagcatggaagacgcagtcataaaaacacttttaagaaatggttcttttctgcattgccgttgcaatgacagcctgcgccgtgagccgttccaagtctctcttgtagcgcttcacgctgtgccgctggggatgctgggaagaaagacatgtggtccctggtcaatatggaaacactgtatatacagttttctttcattaatactcttaacaacctgtgcatgaagttgtcaatgagttcggcttgtggcccagagaccccagctctctcagggttgtgtgaagtttggatgtgcagtgtcctggtcccccttctaagccgatgaagtttgagtcggatatccaagccacttaactcatttttctagaaagctgcatctggagattagggcatgtctggctgagaaggaaaaccttgtcttggaacatatctgccagccaagaaggcagaacacccactattccctcagggtgagggagtcacaagatcataaagatctgtaccgggaaggacccttcagagtcacctagtgccatgctgttctttaaaaaaaaaaaaaaaaaaaatccaggttaactttttattatttaaaaagttgtttttttacttatattttggtcatactgtttcctcccccccccccccaactcctccctgatcctccctacctcctctctctctctctctctctctctttctctctctctctctcaaaatgcaaaacaagaacaagccaaaaacaataaaacaaaacaaaaaaaagtacccacagcaaaacatgtaatctcgtttgttgttgttgttgtttgttgttgttgttgttggcagctactcctgagaatggggcctgctctgaagtaaggctgagctgtctatggcatttcactggaaaaactggtttcccctctcccggcaagcataggttgccaaaggatccttggttagggtgtggctttgtgtccactcccccttcttggtgctggggtatttgtccggattgaactggtgcaggcaggtcttacacatgccgcacgccgtcacagtctctgtgagctcatatgtgcatcagctctgttgtgtctggaagatgctgtttccttagagtccctcctctggctcttgctatctttccagctcctcttctgcaaaaatccctgagcattgggagctgggggaggggtggggtaggtgttgatgaaggcaccccatttagggctggatgctccagtctctcacgctctgcacattgcccagttgtgggccttctgctaattaccatttactgcaagagggaacttctctggtgagggttgagtaaaaacattgatctatgggtctagcaatatgtaaccaggagtcattttattaatatgtttctttaacagggtgatagtagtaagtttccccctagggcccatgatctctctagcctcaggttcttggccagtttagcagaatcagtatcggatatgggtttcattttatgggcctctaaaaagctagttttagacagacaatcagacagacatggttgaccccaaaacatatgtgccactattgcaccaggatatcttgtgggcaagccactatattatgcagggtttaaagctgggtaagactaactgttctttttctcctctggttgtgtacagagtaccttctagccctgtgaatgttagttagtaccagttggatttccatgtctttaataatataactaaatgctatactcagcaataaagccttaaacatcagattgtggggaacaaccaacagctcctttaaaagcatgttatatttgggggatgggatctagggcaccccatccattcgtttttgaagctggaaaaattgaagcccagacagctgctactcggagcccagagcatctgttctccccagtcctgagcagatgaccaatttctggaatctgtggtggatcagaggtcactctgcacttgaagaggcagccagaagtcaaaggagtttagcacagcggagatgtgcaagacaaagaggctgccaggattctgaggttcctgagcgctcagcctggccacagcagttcacctcattcacctgcctcagatgatgtcatcaccttagaagcatattctttttatggaagcctaagtcagattgtgtgcacaagttagcactctaaggttctcttgaaggaattcattacaagatcctgagttgaaagttgtccgtaggaagcaaaaagcttgtgataaagccctgtgccatggcctataaattctacctgacccagctgataacataatggttaagctggccaaaggctgcctgtgtgagggataatggttgctgttctattcatatgacacacacatacagagggggaaggagggagggagagagagagctccccaaccaagatcccatgggtgtgttttacaaacacaccgaaaatgcccggaaagcccattgtggtttttgtaccctccagatcattatttcagcatactcgccaggtcaaatagaaacattcacttggcaagaaaggaaaagatgtccctttctgtggtcctcctgccaacaccaagaggagcattgttctgtcaggctggcgtgtggtgagtcaacccggtgcatccctcccttccacggggtcctttgaggacacccgaagggcagcagccttgggggctggcccacaggtgaggctttccctttcctgaaggaggatggttgaatacaagagccagagaagacaaccccacagagagggacaccggatggtttgaatccccactgtagaaggggttcacatcatagaaaagggatcaagatacaaacttctaaagattccagtactgtgtgtggcttttgtcttgtttggattagtcacacccagctttgagtgacacttgctatttgtctcctttaggaaatcaggctgtgtcagagcaggggctgggtctgatttgtctcttactttctgaaccaggtctttacccacctttgtctctaaatagtcttctcctcacccattcctaggctgcccatcctccatctcctgctgcctccgtcttctaatctctggccatcgtcaaggccacctggtatgcgtttgggtcctgtcctgatcaatctactccatgtgatttacaaagggcacttacccaaccctttggctggtctgttccatcttggccttgcctcccaccccgcatcccccgccacaggaccaatctcccattgtgcatgtcatcccatatccaccccatctctcttgtccagctttggggaccacatctttcctctcttataccctactcaatggccacactggactcctgtgagaccccatctacagctgcaacacatcctaacctggtacctggcacaaggattggcagtggaagacaaaccctagcaaacacatgtgtaagcaactctggtccggcctacaccaccctagggtcccaagggttgaattcggccctaacctgtctcttctaaactgggactcattgacaaactacttagacttcccttttgttgtgttgagaacgggatggcaaaatcttcctgcaagctgctatcactgatagctatcataagaatcaagcaaggtgcctgggagagtctttgaaagcaaccagacacttgtacaatctcagggcttccgtgtgagcatcagtgagttcagggcagctccctggggtctcctgggaaccactcacatccagctctgtgcacgtgcttacaagcagaccaaacacactagtggtaacgtgggcctcttccctctgcatttttataaagtgaatcgggcgaaggaaatgtctaggaatagacagtcttcctcaactcccccaaaataactccagtggaaacaatcgtggtaacattcactctgatgtattgtttccagccttctgcaatatgggaaaagttctcccgtcacttccaactcaactgggaatcaactggacttccagagaggcctggaaacaaaggggactgagcctgagggctgccctggtgtcagggcctgctggtgctagacaatcccaaggctgtgtacacgtttcttcttcctctctccttccctttggggacatgttggcttgacgcctttggattttcccatggataacgtctgggggacattatcagaggcatttattagaactgcacatggttgtttagagcttcctctgactatacagaccagagctctcagtggcaccgtgaccccctacacacacaccaacccagtctgcctgccttcctgccaggcctttgcctacatagtcccgtgcaaactctaggcctgatcaaggccgagcccaccgtccacctccttgctgcctaccgtgctgatctgcccacaccaaaggaacagcagcacctttacgtcagtttccctccactgccctttccctgacctctgaagcatccatggccttccacaggcctgggagacagataagactgaaagctttttcttccctttccttcttccatttactgccccttgcagagcgcccaaaattctccagaactctgttcttatcaccacagcctttcaaaaacaaaaacaaaacaaaacaaaacaaaacaaaaaaaaactcaacttgtcgtgtgtgtaaatgcagtttaacttatgtttaccattataaaagccatgttaaacccttttcctatttcttgttacacacatatacacacatttacgtgcatgctcaacacacatacacgacatacacacatacaccatacacacacacatatacacatgcatacacaaacatatacaccacacacacatgcacacatttatgtgcatgctcgacacacatacatacacacaaacacatataccatatatacacacacatacacacatgcatacacacacatacacacatgtacacatacaccatccatacacaaacatatacacatatgcctacacacacagacatacacacatgcatacacaaacatatacaccacacacacacacacacatagatctagttctttcttgtctctgaagccttccttaattcttctagccacaacctctctgcttctgactctgccactcttcagagtctctgttgtctcccttttctaagaaagcgtccccgactactctgatggaatattgctggaatcttcgcttgtttcagcgtacaggacctatcctccctcatcacatttcccactctggagcacatccacatagcaagtgnnnnnnnnnnnnnnnnnnnnnnnnnnnnnnnnnnnnnnnnnnnnnnnnnnnnnnnnnnnnnnnnnnnnnnnnnnnnnnnnnnnnnnnnnnnnnnnnnnnnnnnnnnnnnnnnnnnnnnnnnnnnnnnnnnnnnnnnnnnnnnnnnnnnnnnnnnnnnnnnnnnnnnnnnnnnnnnnnnnnnnnnnnnnnnnnnnnnnnnnnnnnnnnnnnnnnnnnnnnnnnnnnnnnnnnnnnnnnnnnnnnnnnnnnnnnnnnnnnnnnnnnnnnnnnnnnnnnnnnnnnnnnnnnnnnnnnnnnnnnnnnnnnnnnnnnnnnnnnnnnnnnnnnnnnnnnnnnnnnnnnnnnnnnnnnnnnnnnnnnnnnnnnnnnnnnnnnnnnnnnnnnnnnnnnnnnnnnnnnnnnnnnnnnnnnnnnnnnnnnnnnnnnnnnnnnnnnnnnnnnnnnnnnnnnnnnnnnnnnnnnnnnnnnnnnnnnnnnnnnnnnnnnnnnnnnnnnnnnnnnnnnnnnnnnnnnnnnnnnnnnnnnnnnnnnnnnnnnnnnnnnnnnnnnnnnnnnnnnnnnnnnnnnnnnnnnnnnnnnnnnnnnnnnnnnnnnnnnnnnnnnnnnnnnnnnnnnnnnnnnnnnnnnnnnnnnnnnnnnnnnnnnnnnnnnnnnnnnnnnnnnnnnnnnnnnnnnnnnnnnnnnnnnnnnnnnnnnnnnnnnnnnnnnnnnnnnnnnnnnnnnnnnnnnnnnnnnnnnnnnnnnnnnnnnnnnnnnnnnnnnnnnnnnnnnnnnnnnnnnnnnnnnnnnnnnnnnnnnnnnnnnnnnnnnnnnnnnnnnnnnnnnnnnnnnnnnnnnnnnnnnnnnnnnnnnnnnnnnnnnnnnnnnnnnnnnnnnnnnnnnnnnnnnnnnnnnnnnnnnnnnnnnnnnnnnnnnnnnnnnnnnnnnnnnnnnnnnnnnnnnnnnnnnnnnnnnnnnnnnnnnnnnnnnnnnnnnnnnnnnnnnnnnnnnnnnnnnnnnnnnnnnnnnnnnnnnnnnnnnnnnnnnnnnnnnnnnnnnnnnnnnnnnnnnnnnnnnnnnnnnnnnnnnnnnnnnnnnnnnnnnnnnnnnnnnnnnnnnnnnnnnnnnnnnnnnnnnnnnnnnnnnnnnnnnnnnnnnnnnnnnnnnnnnnnnnnnnnnnnnnnnnnnnnnnnnnnnnnnnnnnnnnnnnnnnnnnnnnnnnnnnnnnnnnnnnnnnnnnnnnnnnnnnnnnnnnnnnnnnnnnnnnnnnnnnnnnnnnnnnnnnnnnnnnnnnnnnnnnnnnnnnnnnnnnnnnnnnnnnnnnnnnnnnnnnnnnnnnnnnnnnnnnnnnnnnnnnnnnnnnnnnnnnnnnnnnnnnnnnnnnnnnnnnnnnnnnnnnnnnnnnnnnnnnnnnnnnnnnnnnnnnnnnnnnnnnnnnnnnnnnnnnnnnnnnnnnnnnnnnnnnnnnnnnnnnnnnnnnnnnnnnnnnnnnnnnnnnnnnnnnnnnnnnnnnnnnnnnnnnnnnnnnnnnnnnnnnnnnnnnnnnnnnnnnnnnnnnnnnnnnnnnnnnnnnnnnnnnnnnnnnnnnnnnnnnnnnnnnnnnnnnnnnnnnnnnnnnnnnnnnnnnnnnnnnnnnnnnnnnnnnnnnnnnnnnnnnnnnnnnnnnnnnnnnnnnnnnnnnnnnnnnnnnnnnnnnnnnnnnnnnnnnnnnnnnnnnnnnnnnnnnnnnnnnnnnnnnnnnnnnnnnnnnnnnnnnnnnnnnnnnnnnnnnnnnnnnnnnnnnnnnnnnnnnnnnnnnnnnnnnnnnnnnnnnnnnnnnnnnnnnnnnnnnnnnnnnnnnnnnnnnnnnnnnnnnnnnnnnnnnnnnnnnnnnnnnnnnnnnnnnnnnnnnnnnnnnnnnnnnnnnnnnnnnnnnnnnggtagagagggaagcccaactgctgtagagagcacttagcttcctagctggtccccagaagtggggccagcagaacctgacctggacccgaactccactttctgccaggctttataaagttttattggaccccagccacccttccctgctgctcttgctataggatgggaaaattgagttgttgtgacagagaccatatggcctgcagagcctaaaatagttagtctctggctttttacaggaaaagtctgccaacccctgctctagagggggaccctgcatagactccccggctgcagtttgcacattgacatggctcatatgctggggaagttttagaccattctctaggctctttataattttttagtggcccttaaggcagagctgatagagagaggaatggtggtcttggagaaccccagtgggctttatgtgagccgccatctgctctgtggcctcccagtagagaattagggggtccccaaatcagaccaacatagactgtggaagttagtagcttgggctggggctgggctctgtacctcccaccgggatgatagaatatggcagaggcaggaccataggactatactgagcagggcctagggatgcagggcagtgccagcagacaccagaaggccaagcttcaatatcctgagcacaagttctcagattctcctttctttcttcttgcgccaccatggtgcccctgaaagtaggtcagatcactgtctgctccagccacacggagggaaatagacaccaagtaggtcacggggctgctactgcctagtaagcctgcgggctcaacccaatggcttccctgacacagatcacccagcaagacccctttcacatgtccgagactccctaatggcccactcccgcatgacaaaaggtcaggcttgctttctgggaaggaacaaatgctgactttctgacatggtcagcgcaccctagtctgaagaaagaaacaatccttatccttaaaatatctggcttcactgaggagttaacacatcgaggcagttgcttaacatcccaaagacatttggcataggacttctggtcaaagcacagctttgtgtagctctgtgttggcgtgcaacactgggttaagacctttacggatcatgtatctttcttcctaactggaaactgtcttaggatccatacttcttaatttgggtaggttccttggttgggggtaggggttgttttgctttgttttggacaaccccctggtcagggaggtccagtattttctcccagcattgactataattcatttagcccactggcatcttaatgtagaagaagagacatgcagtaaacagagggcccagaatagcagccccgtggatgtgtgtttcctgtaccataactgcttccagagtggagacccacagttgcactctattgccactccagaccttggtgaacaccgtcttcatcacttccccattctgtcagctgacaattgctgagcccctgctatgttagttgctgttgggagctcaggtccctcccttgacttctggatgggttcctattgtggtttgcagagtgtggtgactgttcttatgtttgatgctgagctatgggcagatcggctcttgtgtattagaagagttggcaccctggttccatcctttgcttgtatgcctttagcacgtctgcttaataaagcccgtctccttttctacccctgttgggagtggatcatgacagcacccttcccttcagagctattgggaggcttaatttatctcatccatgcaatgcacaatacctcagtgtacagaagtcagtgtgattagcactgtaacagcttggattccgtgcaggcatcccgtttctcctgtctgagtatcttccaggagaaattgctccctcggtaagcagaagggcgggtatttatcaggcatgctgtaggggaaggaaagagctggcaatctagcttcccctcattgtcaaggccactcctctgcacgtgcgactcgacttaaggatgtctgagcacaaggatagctttgttgtctccttgtcttctggccgccctgcagtgacccacaaagtagctattgaaaaagtcaagggacagagcaaacaggttttgtcccgcacgatgaagctgttctttgctctccaactataatctcagctatcagttggaagatttccacagaatgtctatagcattcacctcgtgagtctgtggatagagctaagggttcagacaaggaagctaggacccccggagtctccagagtcctccagttttatctaggctgtaagtcctagctacaattgatctccaccccagccatttcgcgccaataaagaatacaaatccgggacagagagcaagagttctctgcactttataatcagagacaaccaagtggagaccaatgaggggaacaccagttgatgcctgactttcagtcccagtttgagcttgagcactgtgcctttcaccatcaggcctccaatctcactatgccgaacctatgttacttgcacagacacgccagatcaattcttccctttgtggacactgacaccatagtatatttggctttagctccatggacctctggtacccttgggctattctctctatgggcagagttggccaagagcacagcacatcacctgcttccatctctagcaccttacttcttcttcacaatgaagggccagtatcaggttctctattcttaacagaggacaccagctcagagggaggatgcctaaccaggcctgtctgctgctttgcacccaggacttgctcagaaaatggagacatttattataagacagaggacacacggagttgatctgtgggcgtgccctttccccctgcatgccagtgaatggccaccttggtcctcaaaggtcttacggtctgaggataaaggagccagacagccaccatcattcctgtttaacagaagagattgcctttgttaagcacccagctgtatattagaaggttgagagctgatgggaccgtcaaagatctaacttcttacaaagctagaaatagaaatagtgccttgcgtaccatagactgtggatccctggatccctaggttacctgtaagtgttcttagtccctatagacgggacagggataggcccaatctggctcatccagggctatccattgtcttaacttcttttcagaagtagttctgaagatctacagtgtgtaaggccctatgtagacatcatgagcattcacgtaaaggaaacatagccctgaactgctgtatgtttacacatctttgctagggaggtgagtgtgtcagcaattacctagacaattcagaccacggatggagccttaaggagtctgcccagatgctgtgaccacatggactcatgggaattcgagccagctttggagggcaggaacattgtgctaaggggcaaaagctgagcctttgggaaggctggatgcctcaagtaaagaaagagaaacgttttctatggtggagtgactgagaggtgtggaggtccctggagatccctggctggcagtaggttcctcgaaactccactgcagacactgctgcatcctggccccagcccagctcttcttctgctgtgtttccatcaagagagcttgaagtggctctccaggccagcgggatgaaagcggccgctggagctttcctcctgggtggtctgctcctgagataagacccatgaatggtgggggtctgaagaatcacatcctccaagtgaggatgatcacctctccagccggaaaagctgtgtggcagcggggaatgtcagctgtgccatcccagcagcccaccccagtccctctacctgctgtctggtcccatcccttaaaaccagggtgtacgtgctctggccttgcaaatcaagctggaaacactgcatggagagcagaggtcagtggctggatggtgacacctctcctccccaagtccaacctacagagccatcaggagagtgggggaaaaggggagagagaaaggaggaaaaggagggggaggaggaggaggagaagaagaagaagaagaagaagaagaagaagaagaagaagaagaagaagaagaagaagaagaagaagaagaagaagaagaaaagagaaggaatcaggggcacccctgatgaccttgtcaatgagggaaactgtcagcccacgaggggaaggtgacagacaacaggagagtttctactggactgaaatctatcacaagagatagcccagctgcaggatagccctggaagggtttgggactggagcaggactcttttttcatgtggcttgggggagggacaattaaattgtaaggagcaactggcatctcagggttgtatggtcatggatcaatcagtggctacacaaagcagttataatgtgatgagtggtccaagtggtaaggcgataactggggatagaagaattgatgagcaaatgagcggaaaaaaaaaatgccctgtgtgcactaatagcatatgaagaattacttaaagaactgtatccagcactgctcatcttgactaactgccatgagaaaaaaactctttttttttcagtgtgtgtctgaatagatgtgggtacttgattttcataacaagaaagtccaggtcgatggtaaggtccattcctgaggcgagcccaaccagatagcttttctttaggtttgcagtatgagagaaattgcagcttcacagtggcctggagcttagtgaaaatggttactgatcatcaaaatggcttttggaagtcctctgatggttcacagtgcaatgctaatatgtgtgagggtgcaccctgctgcacgagtgtataaagcccatcaaagacctgtgtgctcgttcatccgactctctgtaggtgaatttgagtgaagtagacatgcacttggccaagatgttgtcaagaatgctcttcccacagagccagtcctagaccatggaaaggccatcttcattttgaagctaagtccttcaggatgtccttgggcaaagctgagaccacccattcccagttttcgaagttttttggactataagattttaaatgtcagagactacaaatccagtataaattggaaaaaaaaatattaaagaaacaggtttacatagagtgaagaataagaagagcaagacggatccatttgacactttaaactgttatgttttattttattatgattgtgtgcattgatgtgggtatgcacatatctcacagaacatgtatagcagtgagagccagctcctccttccaccacgggctccaggatggatctcacaccttcaaggcttgaataataagccatctcactggggccctactgatagtttagtctcctcctctttctggtcttgagtaactttcttcagcctcctctggtccatcatgccttcacagctgctcctcagtgcacttcctgtttaaatgatgtcctttgaatgggtgcagcctctgagctgttaatgctcaccccctaccaaagagcggacgtccttagcccgactcactggtgcatctagtgaggattttggtaccttgtgggcctcattcattgcccgagtagatccgaacaccactggttctggatcaaggaactgccttttagtcctctcgtactcccgccgctacctgccagtgccagcactgagcctgtccccgtgggtcctcagtcaagcctagtagaaagctgaaagctgtctcctctataacgctcagcattagaagcatcagaagcagctcgctgtcaaggattctgcactggccatgggtaagtaaggttcatacataccttgggctgaaggttttcctgacccaggtgttctatgtatagttggggcattcttgggccaggaaatcaaagaaccttatagtccagtcttaatcttcataattctctgaggtgggccttcagtacttccccctcgctagctgagggcaacagaaggatgagcgaagtgtttccatccaggtacccatggtaagaggcacagatgaggttaaactagactgttgacccttgacccccattcaggtagccccaaatctgcactggggaagccattgcttcactactcatcatgaacacgctcaaggccaaatcagtccatgctggcttggggccccactgcccttgggtaccccgatgtcatgtgtctcatcccattattcagacctctctccggcggcctctgactagccagctttgacttaccagggcagaaacatgatagccatcatcaggttctttcatgttgagcattagtggtgcatccttccataatggggtacaccttatgctcagcctgtctggtgaggacatagctcaggcaagtgcttctttttgtggggaccctttacctcaggaactctggtgactgctagtttgtatggtaagctacacagtaggctatgctcagaaggagtcaagctgggagcaccctgacctcgttcgttgcttcccccactcgcaacccctcccctacccccatctgtggctataaacaaagatatttggcctcctgggacctgtggatttctttgagagagctaggctctcctgtatctccgcctcacagggcatctcaagcatctatggactggccacctctcttctgtagctgctgctacttctgtccctcaggtggactctgaacctccctggggggggggctcatcccatttttcacaatggcacctgcctctcagagactggcattgtcctctggcagctagagtctgtcttcttgtcctctcctgggcttcccttatgttcttctccagatctgaggttctctctttctgccacagacataccattcagttaggggccaaacctcaggacacctgtacatcagctccacccagagagcactcttaggctgcagaacagaactgtggcagcctatggctctacagttcctgagcccttcctgctttgctgtgtcattgctgtcccttttgatcaaggcatgcttccaggatccttgtggatgctgcatgtcctgaaagtagagggcacctatctgggtcccttcccatgtcggagtcaccagaaccatcctgaacccagatggactgcatcctggaagatacgggactcttagtcttgggctcatcccctaaaggaggtctgaagcctctttggtctttgacccagaatcataggcatcctttcagggccccttcccacacagacaccttctccacactccccagttgcagatagaccctgtcaatcatacttactaatcacttctttgactttccatggtatataatacagaaccaaccttccaccattaaccagatagttcgtggcccctgccctttgcaaggatatctctgcctagtatttgctttatttagaaattaataagtaaaaaaaaaaaaaaaggtcatttgtatctgaattacgcagtgaattgtgctggcatggttgcccctgcgggacagaaaggaaggggtcgttcgtgttttgttaacattgtacggacacaacgaggttagccactacacctaaagttgtgccatgttgaattagtaaaactttttttttggttgtgagtaacagaaagccagttcaaaatattttaaaggtagaaggatcttcaagctcttgactcaaaagagagcttcgtagtcacagcaaaggagagaggaaaggcaagattttcctctgttgtgtaaaaaagacagacaggagctgcatgagtcactgctctgcgatgtctaagcttagcagttgtcaaaaccttggccacctaaaaggtgtgtgcagtatcttatgttggctgtatccttaaggaatgaaagtttgatggcaaagcaggaggaggttcttgtctttggagatctgaataagtcggctttctgtgactataacaaataactcagaagtaaccagcttacgaagagaaaaggtttgtctgggctgacgggtttcgttgttttggtttatgattggactgttctcgtggcttccggttgtggtgaggcagcatagcattgctagcacgactttctcacatgtgtggagtgctttcttcctacttgcagattcggcacagagagggagaaagataacagacctatgggaaaattcggctgtagtgactccagtgaacccatatccatgctcagcgggcatttacctaataaccaggtgtaaaagagaggaagtgtagggtcctactgttcccttcagagccttgtcctcgatgacctatgacctcctcctagactccttcctcttaaaaggttctaccacctcccagttgcatcgagctgtgatcaaaaccagatctagatggtagcagtgtctaaagatgtcttgcatagagaacccagctctagaacgaggccagactgcccgagtgccagttttgctgtgggttcttaccaaggttcagccaggaatgaaataaccacgtgcaatttcaggaagatcccaggctccatgggaaacctgaccagaatatgtcagttacacacctcgtctaaaaaaaaaagtgttctgcgcttactgcggagctgctatgcagtgtgtgtcggtggtgggtggaaaaggttcatgcttcagggtacatgggagggatgagatgacaggagcggctacagagctctgagcagcctctgggtctcatccctccctgcttttatctatgtttttatattgaaactccagctaaggtattgttgttttaaagggtctccactgattagaaaaaataaattatgagaaaattgccaatttaaacatcgcaagcaggccttcccctccatccttctctctgaagcatgtcggtttctctaaatagctgcacagtctagagattccaggaattttagaagcattacctgtttatttctgttgggacgtgacccacacatcctgccagtgtggaggcagaccttgatagggcaacttcttagaagcaatgggaaaacatagctcccagcgggaggaagcctctgtcctcagaggagcagtgctgagatctctctggccctttgagttcccaaaggcttcaaggatcctttggagtgctaacctttgcaacatctctggctagagctagggatggaacccatctgagaagcctggaaatggtagcccatcccccacccccataccccaacagaatgtgccctggctccctgaggctcgtgttccctcctttgcccagaaggcatgggagacctaaagtctatttggctattccatactgagcactcaagccctcccaacatgccactcgagtgtgctgaggagaagttattagcccccatgccagttatagatgttcatggaaggaacagagatatggaggggtgatataatatgtcatgaaccagtagagaaactatggttttctcagtaccaagcacaacaggcagatagatgtatccagatgggcagagagggcttatctggtcaggagttaggcttgggtaatggtttgaatgtgcttggctcggggagtggcactattaggaggtgtggccttgttagagtaagtgtgtcactatgggtgtgggcctttagatgaagatgtagaactctcagctctgcctgcaccatgcctgctcagatgctgccatgctcccaccttgatgataaggactgatcctctgaacctgtaagtcagccccaattaaatgttgtcctttataagacttgctttggtcatggtatctgtttacagcagtaaaaccctaagacaggtaccttccagctcagcacccctgtcactccttctgtctgccctaggatatccagtcttcctttttcagtaccatcatcttcatgacctctctgctccctaatgaatgcatttgtttagtacctggtcctgtgttgtctgggaggaatttaacacatcaggaatgagacttcctagtatatgtgtaacgctttcttaagagctgatatgtagtgagagaaaataataattggccctgagggagtcctggtgggatagctctactggatccacatccacagccaacagccagaagtcaaagatccaggagctgagccttgtactgacggcctgtgattgcagctgtgaagacagatgaggaagaaggaattcaagtttcaggccaccctgagctacatagcaaggccaaccagggaccctatctcaaaataaaaaggagttgggatggacgccagtggtagagcccttgccctgagatcagtacccagtactgaaaattaattaattagttagtttattctaaaagctcatgggaatgcttagaaaagaaatctcccttgagggtcaaacaggcactgcgagccatgaaacaaccagctgctgccttgagctctgtgaaggagacacttctcaacttccccagggcagatgggaaggaggtggtaacaacagccgcagtgcgcacacacacacttgccacatgtgtgcacttgacacacgtgcgaacacacacacacacacctctaaggtgaaagggcaggcaatgatggagtaatatgaactcagaacttcacctttatcagctgactgactagggactagaatacaccgagcctcacaggccctgccttgggccaggcaaggtagagaacagggggatgtggccccagctgagaccagcagttcctctcgtgatgagtatttccaccacctcccctgcagagcccttgtttagtagagcagcctcaattagctcgagcctcagctccctcgttccctcttaccctttctttctcaacaaatatttcaacatcatctaccatgtgtcagacagcgttccatgctacggtcccacagccatcaagacaattttccactgtcctcttgcgatttatgtctgatggtactttctgagaaaactggagtagagatgtgtcatatgcagaagggctccgggtggacggcctcccatctcagtagcccagcctgggatccgccgagctcaggatccctcttccacccagccgactccccatccctccagctggatccctcttccgcccagccgactccccatccctccagctggatgaagcatgtgttctttcatgtttccccagagatttggacccctcctctcccatggtagcagcaggtgagagtggagacctgagcggctactgatgtgataaggctggaaggcctgggcacaacaagcctggcactgcccagtgaggcagcccctcttagaatctatgtgtgagactagtaccagatggactcagctagctggtgatgttgtaggagcagatgtggagaagctgtcagacaggcccaggggcgtggagaagtgccaggggcttcggtgtgagatttgcatgggggtttaggggcatgggtgtgaattttccagagctgccaggacaagcaaccaaggctgagaagcatggtctcatagaaccatcaagatgtctgcgctctaggggagtatctttccttgcctcttcccagctccctggcctgccttggtttgtagctgcctctctgaagacattgcctccatcttcccctgacttcctccctctgtctaacgtctctgtgtccaaagtcttttcttttaaggacactagttgtgggttacagacccaacctaatcccatgtggcctcatcctaacccgagtgcttctgtaaagactgtttccaaataaggtcacatctgtgggtactcgggataaagattccaataaatgttttgagggacacagttctgcccaatgtaggttgaagtctatacagaccctgtcaagttcaggttcaccccttggtggcatcttcctctgaactacatgcattagcttccttacctgtgtgcacttagtctgtctaggaccaggaattgcttttgttcaacctgcttttctctacctgtctttgtttgggtttctgttgctatgaagagacaatatgaccaggacaactcttataaaggacaacatttaattggggctggcttactagttctgaggtccagtccattatcagcattgtaggaagcgtggaagcattcaatagtcatacctgctggagaagctgagagttctgtatcttgatccaaaggcaaataggagaaaactgacttccagcatctaggaggagggtctcaaagcctacccccacagtgacatactttcttcaacaagaccacacctactccaacaagaccacacctactccaacaagaccacacctactccaacaagaccacacctactccaacaaggccacacctactccaacaagaccacacctactccaacaaggccacacctcctagtagtgccactctctgggccaagcacattcaaaccaccacagacaggtgggtgggtggatggatggatgatgggtggatggatgggtggtggatgagtgggtggatgggtggctgggtgatgagtgggtagatgggtgcatggatagatgtatggatgagtgggtagttgatgggtaggtggtggatggatggataagtggatggtggttggatgggtagnnnnnnnnnnnnnnnnnnnnnnnnnnnnnnnnnnnnnnnnnnnnnnnnnnnnnnnnnnnnnnnnnnnnnnnnnnnnnnnnnnnnnnnnnnnnnnnnnnnnnnnnnnnnnnnnnnnnnnnnnnnnnnnnnnnnnnnnnnnnnnnnnnnnnnnnnnnnnnnnnnnnnnnnnnnnnnnnnnnnnnnnnnnnnnnnnnnnnnnnnnnnnnnnnnnnnnnnnnnnnnnnnnnnnnnnnnnnnnnnnnnnnnnnnnnnnnnnnnnnnnnnnnnnnnnnnnnnnnnnnnnnnnnnnnnnnnnnnnnnnnnnnnnnnnnnnnnnnnnnnnnnnnnnnnnnnnnnnnnnnnnnnnnnnnnnnnnnnnnnnnnnnnnnnnnnnnnnnnnnnnnnnnnnnnnnnnnnnnnnnnnnnnnnnnnnnnnnnnnnnnnnnnnnnnnnnnnnnnnnatgtgtgcatgtgtctcatatgcactctcctagcagtgggtagacagggattctctgccctccctccctccttccctccacctctctccacccctccctccacaggaagctccatttctgtgagctgcttgtctctgaggccccacacaggtcaaggtccccgaggtcatgggttagacattaggggacagtatccaagtctccgagccaaagggagaatggtctcctggagaagagttgaggaagggtggtacttaatggtagtctaggtccagggtgataccttagaggcacagtcacagccatctggctgtatgtgagacctgctggagacctgctaagaaaggtgtagcaccaagcccatgggtactctcaaggatgctctggcagcctggtgggggctccttctctaccaggagatcttttctgaaaagtaggggcatctctgctctgaagccagaacgaccctctgccctgagcaaccatcagaacaacaaccagtgctcctcaggctccttaactggtcacttctgtccttgggcactctatctaggacatgccactctcccaggctcatctcagtggtcgcagttcaggtcagctgttctcagagatgaaatggctgagggagacttttcatgggggattggacgatcgcctcctacagtcctgggtatgagcaaaagggcaacttcccactgctgctgcctgtgttgggggagaggccgggggacgcattagattccagaactctgaggtggggctgaagagactggcacctcctggctcatgctatgccaagcactgtgggcagctccatctgtcagcccagagctgagatcctggtctgctgccagctcaggactagcttgggagggagtctcagcttcctggccattgtctattgggagcacacccagtgtgttcctacagtgacctggagaggcctagagtgaggtgggagagacagggggagggagggagacatcgagggagggagagagggagagagaaggggaaagagcccggccagaacctggtcagggtgggagacaggaagtgagagaggaagactcggtgtttttccttatttgtgttttatatgaaagaaaacaaataatatcctttgaaaaaaacccattaaacaaagcatatcctgagggtcccagaggcccattgtggctgcctggagcctggaatccattcacacggtttttggctagattgttggaggctagaaagaccggagagggagggaaggaccatcattaaaatagttcaaaatggcttttgctccctggacttaacagaagtctgtgccaaataaccatagctccaagatcccgggtctgcctggttcagtgtcctcccatcacctctctgggaagctccatcaaactggccagtctgagtgtagtcaggggcaccagtgtcttccacctggccctgtgaaggaagactaaagaaaactctccctgaagagtcccagtgaagggagctgaagcccatagaactgccatctctctcttactgattggcctctctgggccttgatcttcctgtctaccaagtggggctctcaggtatcccaggccccaggctggaaccctccccctagacatccaagatacccctagatcccaccactgcactccagctgcccaggatggagtgacagtgttcctggtcatattctcctcgtggacacatttgcatgtccatcgtgcagaacagcttctgtgaataatcctacatgagcatttggtaagattggcattacaaggaggtctctccccaacctggatgtaagcctgtaatccttataatcgtaaagactgtgtgcaaaaccacccttagaattttccccggggccctcctttgaagcctagaagacaatcaactcttcgcatattttccctaaatgcttccaaggtaaaggaactgcttgggggatttggccctaggattcggagccagtttgtgctcaaggcttgggcttggcacactcatcaccattcttctcaatggcctatgctagaaggtgatgacatgcctagctggagactggaaaaggaacctgtccccttcctgcagcaattggttatgtacctgaccctctggatgaccagggaacactcagctctctggcttaggactctacaggaagggccccctggttgattttcatggaatcagcccttaaagagttcctaaagagaaggatgggaaggtattggtggccttggctctgctgcctttctctgcaaaaccttgaactacacattcaaccttagcatgaacaaaacctatttgagagcttgaacattaagagtccagactcttaagcatcctcccttggtagggattcatttgtattaatgatttccattttctggtgtgatttaatggtcagaatctggcctcccatgtcctttactgagttactgagtgttatcactggaaatgtggtgttgggacacacttggctctttacccaaagtgattcacgtcctctctttctccgtgccacagggctaccatccgatgccccacgaagcagagattgcacataccaagaagttgttccgaaggaggagaaatgaccgaaggtaagaaagacttgtgactgctgtcaccttttcctgggccggctgctgggcacgttagctctggtctatgctgtgacgcgacttaatacctgaggatgagttgctcgcctttgaggtgatgttgcaagtacaatgggctgggcttggatctgcatatctgtgctgggcccagggactgggtccctttggaagacccgcagagggccactgtctccattccttcctgggagtgagcattgctccagatttacagacatgctctctttccataaaccaaagctgcagcaagctcaaggaccagggccctcgggctgcgtgtttagaggcatggcctccaggaggctccccaacctcacaaatccaaaggcttccttggtctgtttctccatcattaggaattgtcctgtgtattagccacactttgcagtgaccctcacggtccagagtagtaaccaggggacgggaaaaacatgatgaggtggcttcgtgtcagagcaagcaactaagatcgagcatccaagacatgcatgtgtgcggtctacaaggctttcttatatggaaaggtcttcttgatgtagttcaaatgaaaaattccaggtgcagaatcatactgtgcgcagccatttgtgctaaagggggagtgggatctttttcttttttcttttttcttttttttttttttcttgcttgaatgtgcaaaaaatatttcaggatggaaatctttaaaaagaaagaataaaaaggcttatgcccaaggaatttaaatgaggtgtttccctgtagggagtttattcttagacaaaggtgatggcttgtggctttacctttagtaaaccgagtatgttctttaagaaacgagaaacagccagctgccttccttcactcggaaccctaggagcacctcccctgggtcctgcatggcctcagctggagctgctgggcttcggctaacccggggctctgacccttcactctggatggaaatcccaaactggaatatagtaggttggcagaagacagatacccagaatgcctgtcacccagtagtagattttctacttctgaaaacgtacacaggggaaatgagtgtccaggtatctgggaggcagtctgtcctgattgaggactgggaatcaacaggcatcagaagaggaaactgagttgggagagctgggccaacccccgcccccgcccctactcctgcccctgcccctgcccccgcccccgcccccgcccccgcccctacccctgccctgccggagcacagttggttgcctgctctgtgactcctctctgctgttacatagaaccgttcttgggttctgggttctgagtcaaggaaagaaatggggaacagccctcaaaggagaactgttgttcacaaggggccaggaaggtgtcagagagagcagaagaggcttgccatccttcctccccagtgtgcgcctcagagatgccaagactctccgagctcactgatgagaaggcgtctctgggccaagcactggcatccaggacagcccacatgtccacttttgagccaggtcaccacgctccacaggagtcgcctagacgggacaggcctccggaaaaacggtgtgacccgggagggagtgtgcatggcatggggagggccaggaagctgtaggggatgctctgcgtaggccaatgcacctcacaaaggatgtggaccgggccggcgtccaaagagaagcaataaagttgattaaagggacagaacgtatgtcctgtgagggggcctggagggctgggtagagaaaagagcatccacatggcaagacccatgaaagatttacgtggaagcaccggcggcagctgcccgtgtttacatggagggaacgtcttggccaccagagtcagactgcagctcagggtagcagacacacacagctgaagtatgtgctagacgaggaaccagtcagaaatataacacggcctgtttatcacttgggggggggggagtgtcctgctatagagcacccatatggtagattattttcaggagagagcaggtaacaatgtagctgaaaggctttattctataaaagctggggaattcctgagtctttcttgggaacagtggtgattcaggcattcacagacaggctaactgtgaattgccaagtcaaccccagctctcccagctgatggccctccatagtggcctcgttaggtaccaaacctgtgtgcttgacactagccttgttagcattgaaagcataagccacactgagaaggtgtcacagggagaggacgagaacctaggtaccgatggtaacctaggaacacagccagcatccacgtaataccccagatcttaccgtgtgtcatgagaagggaagtggcaagccacatcctgctggggtccccgtgactcaaccttggaacgcctgcaggagtcgttggccttctgtctccctacagagtgactggaattgggtccgatagctacaaacgccatgacaaactgctgtgcctagaactgagtggtaccttccggccagaataggcattctcaaacctgggacctagcatcctcctctgcacagcagtctgccacctgtcctaatcctgtatagcgctctaggcgtctctgtgtgcctcgtctctgcacttctctcccctggttcaatttggatgtactagatagctgacctatgtaggcatgagccttggaaataggggctgggtagggtgagttgcttcattttttaagggtgtgtacatgtgtgtacatgtgtgtgtacacatatgtgctggttcctataaaggccagagcgtcagctccccctggagccagagttacagacgatggtgagtctcccaccatgggttctgggaactgaactccaggtcctctgtaactgccgtcagtgctcttaactgctgagccatctctctatcctgccccccacccaaggtacacagttcttgaaaactgtgttttctttctttcatagtttgtgtccaatccttgagaggtttgcacaggctcattcttataaagcactgagtggtctttgcagcagggtgctctccgggtcaggggagctgtaaagggcacagagagcgtgtttctcattactgtctttcgaagtctaaccacataatcgtggcgtcccccaacccaggacagtgacggtcggtaggcagagcccctgtgaaggagcaacctaagcaggcactctgatgaaatctaacttgtggctggttttcccttattttgcaaaaggaattaaccacaaggacagcttacaggttttctccttacaaattttctcaaaatttggacaactcataactacctgcttattttggggggaggggagctaataaaatgtgacagatgtcagataaaatcatgcatttggggattaaaatatgcagtaagtgaatattctatgcatccctagtagtaacctggttttgcaccctccatcactgccaggtagaaaatggagagttgagaaggttcccctaaagctctctgcccagccccagcatcaaggaggaagaaattcactgaggggctgaggactgggctcatagagtctgtttaattcagtgagtgtccttatccctgtgggagggggaggagttgtgcaacgctcctcccacccctacccttgctcccctcacccctgctctgttttaagagatgaacattatcactgcagtgagcaaacactgcatgccacagtatctacagcctgaggagcagaccccaggatgagggcaagcttgggagggcatgctgtggaaggggcaagaggcagcaggctcaggcagagaagctgagcgcaagggtgtcattcccatccacccaaaaggtgggaccattctcaggagacaggcatcatttaattgggcaggggggcggggggacaaaggttatttaaactttagggagtgagtaggggtctttggggaaaacgtatatcattgactagagccagcatgctggagatacctcatttgcctaaggagacctttctaggtgctgctgggcatgacattttaaggagaaaggaaatttaacctgggcgcaacatgcaggcccagcatgttgcagggcagtggggggggaggggagcagtaaccctactcttgctcatgtccaggctttggacatgccttgaccccacctttgctccaggtgttccccccaaggctgcacagctttatcagggcagacttggtgacatgttctgaccctacggggagttctgaagtttgagggacttctgagacttgacctaagatgcagagactatgaagaacttgatgtaccgtgtcccttgattgtccgaaaggggtgtggtctgaggatgagcaggatcagggccttttccatgggggcagcagaagggtgagccctgtttctgaaagggaggtaggcagtacatttagctccccacagttaagtgctgttaaaccccttgtcttattttacctttctttgctgtgacaaaacatcatgaccaatgcaacttataaaaagagtttattaggaccttatagtttcagcgagtgaatccataaccgccatggtagggatcatggtaacaggcagcaggcatacatggtgctagagcagtaactgagaccgtagatctggatccataatcacaaagcagagagaaagctatttatttggaaccctgaaaacctgcttctagtgacaccgttcttaatctttctcaagcatttccaagtactcaaatatatgaacctatgggggggcctttctcattcaaactaccacacctccgattagaattgttctccgtgttattgtgtctgtgatctggagaatacaaggacctaaggtggagctgccacagtgacattctggctgcagaattaaccagagtgttgtatgtgcctgtgcagcatccaagtttgtgggttcagagaagagggcatcatgggatgttggggtgaggggggagattctagaacactcccttttttggagtaatggttcaactactagtgaaactccagaagactttgaaagagagacggagcgagagggagaagaaaagccacagctaggcaaatgatgcaccagggattcccccagaagtcaccctagaaacagaggcaaacatggggctcagaagcccccactatgagaagacactgtgcttgctttgaatatccccctgcctaggttgtcaggagtctcagaagaccccacagactccaaagcccagcctgccagtacttcaagtagggagattaatagacacgacatggccacgggcttttgagtgatgcccacctgtgctgtcaggagtgaggagagcccttcaagtgaacttgcttcgttaagtgaggtcccggaatggttaatgtactccatgtgcagagcagatgggcaggaagaagtgaagaatcccttggccatcctggccagcgtcagatggctccactgcacgagaagccgcaagcgagccatccccctggggtgcagagtcgggctacatgctggatgctgcagggcggccatagtgtctatcctacagctgaccgtgactgtggcttggtgtcctcaaactgtggcagcagttaagaatctaatctctccccccgcttcctctgcctgcacaaactcagatcccaggcatcagccatcggctttgattttgcaagctccttgtaaacactgtgtgtcactgataaaaataaacagggcaagtggaattggaggccgttagtataatatacttacagatacactaaaaacactgattctgcgcttcacagggttgcctttttatttgtaattttatttatttacatttcaaatgttattctcgttcccagtttcccctctgcaaacccccctatcccatcctccctccccctgcttttatgagggtgctcccccacccattccctcctcagtgccctggcattcccctacactggggcattgagccttcacagaaccaagggcctgccctcccattgatgttcaacaaggccatcctctgctacatatgcagctggagccatgggtcgctccatgtgtactctttggttggtggttgtactgcctggttttgtgtgtcaacttgacacaagctggagttatcacagagaaaccatatccaaccataaggcattttctcaattagtgatcaagggtgggagggcccattgtgggtggtgccatccctgggccagtagtcctgggttctataagaaagcaagctgagcaagccagaggaaacaatccagtaagtaacatccctccatggcctccacatcagctcctgcttcctgacctgcttgagttccaatcctgacttcctttggtgatgaacagcaacatggaagtgtaaccctttcctccccaacttgcttcttggtaatgatgtttgtacaggaatagacaccctgactaagatggtggtttagtctctgggagctctggggagtctggttgttgatattgttgttcttcctatggagttgcaaaccccttcagctccttcagtccttccccttactcttcccttgaggaccccatactcagtccgatggttggctgtgagcatacgcatctgtattggtcaggctctggcagggcctctcaggagacagctgtatcaggctcctgtcagcaagcatttcttgacatcagcaatagtagtgtccggatttggtggctgcatatgggatggatccccaggtggggtgtctctggatagtctttccttcagtcactgttccattctttatccctgttatttcctttagacaagagcagttctgggttaaaattttggagatgagtgtgtggccccacccttcaactggaggtcatacctaacttctggatatggactctacaggttctttctcccctttgttgggcattccagctaatgtcatccctgttggatcctgggagcctctttctttcctggcatctggcatttttggtggctacccccagttccccattccccattgttacacacctctgttcaatttcctgaccctctgtacatctcctccatctcctcccatacctcatcctgtgcccctttttcccccctctccctcttttcttcctcccaagtccctcccaccctctacctcccatggtcattttgtgcccccttctaggtaggactgaaacatccacactttggtcttccttcttcttgagcttcatatggtctgtgagttgtatcatgggtattccaagctttttgtctaagatccacttatcagtgagtacataccacatgtgttcttttgagtctaggttacctcactcaggatggtattttcaagttccatacatttgcctgtgaatttcatgaaatcattatttttaatagctgagtagtactccattatgtaaatggaccacattttctgtatccgttcctctgctgagggacatctgggttctttccagcttctggctattataaataaggctgcatgaacataggggcacatgtgttcttattacatattggaccatcttctgggtatatgcccaggagtggtatagctgggtcctcaggtccaatttcctatgtccaatttttctgaggaaccaccaaactgatttccagagtggttgtaccagcttgcaatcccaccagcaatggaggagtgttcctctttctccacatccttgccagcaactgctgtcacctgagttttttatcttagccattctgactggtgtgaggtggaatctcagggttgttttgatttgcatttccctgatgattaaggatgttgaacatttctttaggtgcttcttggccattcggtattcctcagttgagaatttgttgtttagctctgtactgcatttttttttttaactaatgagttatgtgtcacttaaaaaaaacacaattttgagacagagtttcattgtgtagaatttttgaactataattctctgccccagtttttactagtatcaggattataggcatgcactactagattcatttctgaaaaaaacaagtagtgagatttctttgttgtttgtttcttaagtcgtctcagggttctagtttggttttatgattagagaaagtccaaggattgagtgatgggaaaggccccttgtaaccatctttggatcttgatgtctgtagtgttccgtgaatgtgccaggaaagtgaccctttcaaaaaaggacacagatttggtctggttatgatttaacctatgaagctatgctaggaataaataatcacttgttttcttctaaaccatctatatttgcaaatctcctttaatttttgaaatttagaactgtatgcttgtagcttcaacctttccccattttctatcagaattagctcttgtgatcatggagggcagaacgtcacaggctaccacaagctatgtcagaagccagcggtatgattcagtctcaggtccaaaaggcaagaaccaagtctgaggccgggagaatgtcttaagaatgtctgtcttaagaagtcagcaagccagttcagctttcttttgaaccatgcccctcccctgatgggttgagagacgcccatgtacactgataagggtggagctccttgactgagcacagtgattcaagtgtgatcaagagtgattcaagtgtgatgactctaggaacccctggttgcctgtctgcaagtctcagcagctttctggagcttgtgtttcccatgagttctaagcatttctccatccatcaggagactctttacaaaggggtttgtcttccaggaactgatcagggactgactagtccagccctttgtctttctatcagctcattcacataaattgctcagctaatcctcttagacatacagacagtgttcattatccacggattccatagtgcaagcatgcctacttgttaaaacttacagtaacatgaaaatctctgatgttttgagactccatcattggcaggcatggaatagtaggtagtttgagtcacatgccacacaggatcccaacatcacacaacgcaccatcctatcatccttattttgtctctgatcctgatcaaggtttgtcttagggccgagtttttcactcttgtgtgcttttgctagtgattttgccgtctgtgtggctcttgagtaaagagtgggaggtttatgtactgaccctaagttcaagttccttgttggaatagaaaaggaaattgtgggcagcgtgatcacagatctgtttcatcatctccaggattttaagttcaagaaaactgtgatgtgccttacagagagaccaagcatttaaaaatcttcatgccagcaggccttggtcctgcaatgagttcaacgttagctggtctataacatatagtaagtaaacagtctataggcggctgaagagatggctaagaatactgccagcttttccggagatatggattcaattcccaatacctacatggtggcttaccaccaccctgtagctccaacccctgggaatcttgagtccctcttctggcttccccaggcagagcatacatgagttgcacagacagatatgcaggcaaagcgcctatacacatggaaataaataaaatataaaaataagtaagcagtctataaacagaagcacacatataaaaagagattgtacttgatgagtcggtgaaaaatgtaaacagaggggctgtagtaactcagtgtttgctaattccttgttcccggtgacactctggaaagtcgccttctgagcaacaaggatgagccgtgcttgctctttaaaacagggtagagagctactgaaggtggagggatgtgtggggagccatgggacttcaggcatgttcacacatgggtagtgatagggcagggaggacaggagtgggcacttcctaccccggctggctgtcactggcttggtttccactgcttcatctgtgccatcctggggtgacgccatcaccaaagacagctcagccccatagtgactgtcactgccatcctcttgtcaggagctggggggaccgtgaggcagatccacgctcacattgcccacggtttctctttctctctcagcaaggaaattgccctcattaagtccctgctaaagatagataagaaaatgggccaggcagacccccgcctggcaggcagccctgtcagattgggagcaaaatgagtcaaataggaattatttttaggatgtctcctcctccccgcacgcccacccccaggcgggctctcttggaaagaagagcagctcattgcttcaagccacatgtccgggtcctctcagtccttgttagattgaaggggagcccccagaacaagccgtgacatgtcacaccatcctctgtagagtgcagatgcttcacccgtgttcctggtcctcgagaaggctgggcacacccccctgtgagtgatgtggctcctggatcccttttctaccgctctcctttggggtgtacgctccaagctcaggccccactcccagcttcacgctttatgagattacagaccccgtgggggaccctctcctatagaggaaccagtgtgtccctaactcagaacttacaaccatataggggccaaacagacacaagaggtggccttccatacatttgacaggttctctgggtaaatgagcagtgcccatctcccagaactgtgtccacaactgtataactgggcgttcttttttttttcccccatcattcttaccccctttgtccagctgtctgagttcattcagaccttgcaagttctaaagagcaaagtagggatattcaagatcaagaaaggtaactaaggaaggggtaggggacatgccttgtgacctggggacaggagggctattgacgaggaaactagccatagactgatgcagttccaggtgtttgtggctgggacagggcacagaggagcctaggagccagccacccagttgcttcagcttctccacctcagatgtcctagccgttcattctctgcaggagtgggcatttatgcattggctcacaagcaccagctccaactcttcctcctccacacaggctcaaataaccaagctctggtcaaccaatcatctgagtgtcccatagaggacagtgggcatggtgatagccaagcccttggcctggctcacttgattttaggtccagctcatctttcaccaaacaggggtctttgagggtgttgcggagggggagacattcactgaatttattcttcttgttctcagggtcagggatgctattaggttatatgttgaggcaggtgcttaggaagaccaagtaataactggaccctcagaaaacatgagttccgggctggagaggtggctcagcggttagagcactgactgctcttccagaggtcctgagttcaattcccagcaactatggggtggcttacaaccatctgtaatggaatctggtgccctcttctggtggcagctacagtgcactcatatacagaaaacataagatcctcttcctcctaccatttactctgtgaacccttcacagtgtggagggaaaagatgctggaccaagagccctggagtctggtccaggggcgtttgcctttaggagccgagttctgctgctgtgaagtgggactgtgattctagctatcacaggtattgcagagctcatgctacagataaaaacagtgtctctcctgatctattcattcaccataggaagacagaactgagaacattatggaagctagcccaggccctcaggaaaaaaaaaatctttccagaaagttctagacaagctgaacatgtctctgacccccctgcatatgtctttcctgtctgtatgtctttcctgtctgtatctagtccagatctgtatgccggcaccccaccaacctgagctatgctgccatgttctttgcatctggctcagacaccacagaggggcatcttatttacagaggcgccaggctgcacatctgcaggttctaagggggtggcaggctctgggttcacaggttctaaaggaataccaggctgtagatttactagttctgaaggtgtacaagacggcagactgggaagatgtaccagtctggaggtcactggtactgagggagtagtaggctgttcttctatgggtccttcggctggatcctgagatatgcctgacccaccctcagcccaggtcagaagtcactcagcaactccatgagcagttccaaggctcgctatattaagagcactgttttgagccttaaacaaatattagttcgtatactctcctcgacatcccaaggaagggcatgctatttttatttccattttgcagatgaagaaaatatcatgtagagaaaaataaagcggctaggaggcctggcttcagagcctgtggttctcatcggagctctgaggtgaatcttcccttcactcccttcctcctgtcctgagaccctcgatgccttcggcatagacccaataaactcgtagtcaccggccgttcaagactccagggtcttgtcaggatagggcttctgtttttcaaatggacagagagaagggctgctctgcctcatgccaaaggagggatgaatgaaaagacctcagccaaacccaccagacagtctactcggccacagcactaggccagccctgccctccccctaccgagcaaatctatgagtgagcatatgttggaagttcctgcagtggaccacagatttttccaggttacagcccaacctagtaagaggcccaagagaggatcacataagttacagggaaatgggtatccccgaagagatggcttcatctagctgccctctgcttctaattaggaggcccaaaccaaggcataagggtacgttgcacacacacacacacacacacacacacactgccaaggctccgtagcagtgaccagggcacaggttttaaaaataccaaggagccttcctgcctgggtcagcatttaccctgtgctctgggagttatttctgaatcttcccagtaacttaattttagccactttattccaatgcatgtgttttagggatgccaaggtagcctctgttacggtttggagtattttgggagggcctggtttccagaagtgatgcaggggctcaattaggcaagacaccagcaaacagaaataacgtaactcaggaaaacaggtccctggaggtgacgcctctgtgttgctcacatgggagaagccaggggaaagggtcagcagggtgccacaagtggctgctcaggctctctccactctatgcacctacagagatctacctctgagcatgagcagaatgaagctacccaggttttccaagtaggcccagatagacacaaaatggcccaacaccagagtagttaaacccaagtcaatggtaggctccatagacccaccttataagtgctccatagaccctcttataagtggtgagacacccaagttcaccaggcatccatgggaagtttaaacatcctcactgctggtacatcaataatgagatgtttttggaagaatcactaaagagttcatcactttcccctccagtactagggactgatcccaaggcttcccacgagctagccaagtgctttgacactgagctacatcctcagccctcttctcactgggcagggtttcactaagttgtctgggcttgctcactctgcaccccaagcaggccttgcgttatgagcattgtactggctagttttgtgtcaacttgacacagctggggttatcacagagaaaggagcttcagttgaggaaatgcctccatgagatccaactctaaggcattttctcaattagtgatcaagggggaaaggccccttgtgggtgggaccatctctgggctggtagtcttgggttctataagagagcaggctgagcaagccagaggaggcaagccagtaaagaacatccctccatggcctctgcatcagctcctgcttcctgacctgcttgagttccagtcctgacttccttggtgatgaacagcagtatggaagtgtaagccaaataaaccctttcctccccaacttgcttcttggtcatgatgtttgtgcaggaatagaaaccctgacttagacaagcatcctcagaagttttgggttttgttttttgttttttgtttttatatagtagaattataggcccggcttgttcataagctttcgactaagccttcagaagccctctcttacaagagccccagggcctgctccatctacctgctgcatctctccctgccgatccttggctctccttgcctgccttctcacctcctgtctttactcaccaggccccaatcttctcttagttcctttagtaggcctgtgctagctgaacccttcctgggactcctctccccaggtgtcttagtgagggttttactgctgtgaacagacaccatgaccaagacaactcttataaggacaacatttaattggggctggcttacaggttcagaggttcagtccatgatcatcaaggtgggagtatggcaacatccaggcaggtatggtataggaggagctgagagttcaacatcttcatctgaaggccactagaagacgactagcttccaggtggctaggccacacccactccaacaaggccacacccactccaacaaagccacacccatgccaacaaggccacacccactccaacaaggccacacctccaaatagtgcctctccctgggccaagcatattcaaacaccacaccaggcttcctctgctggaccatccactaccctcactctttagcctctcctctgccttttgctggtgctcattctgatgtcagtccagttcccaggtgagtcaggcctgaggacccaataatggacaggaagcctgagagcatactggacccttaccagttgtgtcccagagaatatcccctgcttcctcattcacctcctttgggcacaccattacttcaagaggacaaagaattcaatgttggtgtggcactgaactcagaaaaggaaatgtgtaaagactggaaacaaagatggttttagaaagaaaacagatgagacagggctggtggccccactggtcacaccacacatgcataggtggttcggtgtgttgaggaatgggtagctgagcctctagcctctgaccaggaaacctgatgcctttgatcctgagttgcagccatggcacagagaggtagggtgggaaacctggggcacaggcagagaacagacttgcctggtgttgctgatgttggaaatgcttaggcaggggcagagtcaggtcattaggtccctctgttagaaccacatgggccagcatcttctcaaagccctcatcccattgcccttccttaaagcaccagggaaatctcagaccctctctcctggccaatcctggtatattttagctttgtgacctgactgtaagccattgaggacagtaatccttgtgatgtgaaggggaatgtgccatcccccttctatacaggaggtccctggagcccccaactcactgcccacaccccctgacttgggaagtgggtgtcattggttaatttggtctcaatagatcacccaggcagatctctgtcttttcactagcaccttcagtggccacccagagttaagagactgatctagttgcaacacattaatgagaccacccatcccatgagtggagggttctctggtgcagggagtgagaggggacatttgttgaaagaaggatttttagtttttaaagactgaaaaccacccgacttgaagcaaacacacatttggcctgtacctccattgtctggaagctgcacagagtgagcctctgcagagcccgcattccagcatcattcgcaggtggcctcatgagtatgctgagctgtctagactccgtttgagccctgttgctaggtgagtagcctcaaggcaaaattttgcctctttgaagcagtgtatcttctatcaaatagcccatctcttttgtaggtagactttgcagtgcaaatcagacggtacctagaaagcagcttctgataccaagggctacacgaacctgagaactttgtttgtgtgcattttatacctatgtctatatctgtaggtatgcatttgcgctctctctctctctctctctctctctctctctctctctctctctctgtgtttctctgtgtttgtgtcttgtctatttctcctgtctctgtatgtctctgtgtgtatctgtctgtgactgctttagggaccctgctagtcagcattgccaatgatagtgtgctaaaaataaaacaaaggaccaggggctggagagatggctcagtggttaagatcattgactgctcttccagaggtcctaagttcaattcccagcaaccacatggtgcctcacaaccctctgtaatgggatctgatgccttcttctggtgtgtctgaagacagctacagtgtgctcctatacataaagtaaataaataaatctttaaaaaaaaacagcaaagggtgagaatgaatatttatgttgaatatttatgaatgaatgtttatgttacatatcaaaataattcccaaaatgtaggacttaaagtcccgagtgtttataagcccacacaatttcagagggccacaaacccaggagtagctcaccaagtatgttctggctcagagactctcttgatattggagtctagctatcaaccagggatgtagtcaccaggggctcagttgagagtttggatatctatttcctggtgtaccaggttattggcacgtcccacttcctccagagctccgggttacaaggcaggtaggtctcttcacatatgcattcatgacatgacatgctcatagcctcagttaactcccagagaatctcccgagggaagagcagatggacagacaggcaatcagacactaacatggaagctgcagtgttctattctttaagactcatgccatctcttctgtcatcatccgctagccagacaaatcttctgtgtcacaggggaaggtccaagggtgtggccttccaaaaagtgagagccatctggaaggctgactactgcagcccacctgccacccccagtgattcatccctcctctatccagagtacacttgctctgcccattgttactagttggtgacatcttcagctcagagttcagctcccgtccatagaggtcatgtgcaacatacacacaaaactctctgggtgtagttctttgtatctggttctttctagatctgtgggcctctggtctaaaaggatgagttagctgtactcttacatataaacatacccagtatataactctaggacagacactggggagtcactgccataaacacccattcaagaagagggggcatataactcatttgtctatagctcttctgcaattcagctaggcaaatgccagaggttcctccctcaggtagagtcctgccctgtccctgtcagagttgctctacgtggctctggctccaccctctgccgtggaggtctcacatggagatctctcatgttattgcattcaagatcagtataagatggagatctctcaagtgatggcagtccttgatcagtcagtatgctaggctctcagatctacctctaagtcatccctccatgtctctgaagcatggcatgtgtttgagttattttctcagctggctttctgtgttgtagaacttggggtccaatggcttctgtttattgccgtgtctctggcccttctggtctcactgataaggctcttttgaaaaccaggtagaccttctgtgaaacccgctgttttccacaccactggggaaagctcaccttcaagtcactcaatagtttttctctccttctctttgaccttctgcagaaagaatgccctccagcttctggaggctctcaagtgtggttgagaagacctgtgagtgacccttgaggacagttagaggcacctctgtttcactgagctgtgctggaccatgccagcttccatcctcccaacatcttaaccaagtcccagcctacagtctttggactgtgctttcctgagcatgctggcttctgatctttacccagaagtcatttcctaattttagcatcagatgccatctggttaagtctaggactcttcagaactagcaagttctggttccttttgtgtgtgtgtgacagtccttcttttaactcgtctagctcctctcccagcttacgctactcagcaagaaggaaccaggcaacatctttgacactctggctggaaatgttgaggcaaggtcactgcaccactgtggatatttatacttgttcccctcagcatagcatcttggatgctgctcataaggtccccacctgtggtctctgtaatcctgtcactgcccatgaatcctcacagtggtttatcttaaagtcatgtttctccacagagccttagctcttcacaaacatgtacttgaagtccccattcctgcctactacccaggcctgagacatccccatgtttgagattttgctgcagtagattccctaggcacaagagctccattggttatctcatgccgtgtaataaattagccccggaattagcagtgttagcccacagtgtctgaggttcaaggatccagaacaccagagctgagttcctttggctcaaggcctcttgtgatattgcaggcaagctgtcagccagagcttctccttgtctgatgtgaggctggcaggcctggtccccactggctttaagctgaaggcttcatttctttgcaattgagctgctctacatgatgttcatgcttaggggagaaggagaagaggagaaaggagggaaagaagaaaggagaaataaaggggggaaggaatagaagggagagagaggcagagacagtatggcagagataagataaaggaatgggggaagtggaaattacctgagctcttacaagccactcttctgctgtggaaagcaacctgtcatcccttgtgccatattgtgttagccacacagaactagcctacacagtagaggaagggaccaaacaagtgtgtagtcaggcatagtgatacagagctgtaccccagctgtggtggtttgaataagaatggcccatagagattcgtgtgcgtttgaatgcttggcccatggggagtgacactattaggaggcgtggccttgttggaagaactgtgtcactgtggaggcgagctttgaggtctcctctgctcccagctatgcccactgtggcacagtctcctactgctgcctgtagatcaagatggagaactcttgcctctgccagcatcgtgtatacctgcacactgccatgcttcccaccaagatgacaatggactaaacctctgaagctgtaagccagccctgattaaatgttttcctttgtaagagttgccatggtcatggggtctcatccgtcatggaaccccaaccctcaccaaggcacaacactgaggagaacgaagcagtgacagaggaacatcacgtgcttggcagcttggaaaacaaaagaccctgtttcaaaattttacagtgttcaggctcaagaaatggctcggggttttagagcacgtgttgcggagtttggttcctagcagctaagtcaagtggctcacaactgcctgtaactccagctccaggaactccagcagtctcttctgagcatggacacatgcacacatgcacaccacacacacacacacacacacacacacatagtgaaaaataatcaaaataaataaatcttaaaatcagtagtgtcgatgcaggagtgaagagacattattatctatttaaatttcctgactgtgccctgcccccttccactttaaatgtgaagcttcactaaaagcctggagtgggttgaagtttttgtatttcccgccttctagttcagcttccgagctttctaagaacacccttcttagccagctccctgagctgtcccacctccttcccttcatggctctcttctgcacatctgcagtggagcatcagttaagtgtctcctccctggggaaggcttggagctggaaaatgccattgcctgggcttttgaacagacttgtcctgcagggagccggaggggattccaagaaaaggggaactttccaagctgtaagcatatacatgcacgcaggtatacatgtgcttatatacacaggcatacacacacacatgcatgcacacacacacgtgtacatacaccacacacacacagatgcacacactcaccatataaactctagaatctcaatcattacaacaggctgcacttttaattggaagcataccagaacactggaatctgccaaaaactggtagggaaggcttccatgggtagatgggaaaatacaaaaatattcacagtacaaataatggtgtcttgcccagtctctctcagagtgccctgaagtgggtccaggaggaaagtaagctaagtgcttacgtcctcaatgtacaggggaggtatgtaagactcagaaaggccgggcagctaactacagacctgctagagacctgcggagctgagtgtctcagatctctgaatgcacacacttcctttcatagagtcctggaaggctggtcctgtatagaggatattctctttaccccttcagtgtaagtaacctgaaattgtatactggcccaggtaaggggtcccacttcttatgtgtaagaaggccagctcttctgtggttgatttaggggcacagcagagaaggctgtcagaatggtaaactctaacaggtgtgataaaagatggtgaactaccacacggtgctaggtgctagtggagataaaggggactcgctgactccttcaagtcacttttgaggtacccctggtaaaagcactttaagagaccctgtccccaagtggagaaactggtgcgaagtgccttgtgtacctcgtgcaggcaccaagttatctgtcaccacatttacctgcacatccaaagcccacaagggttgtacttttcctgtctctgaagctgtgggccaggtggcagggccctgagactgggtgtggagtgcccctgagaatggagtatagagctttgctcatggatgacgccagcagacccttcagcatgggagaagcaccagggacattctgaagtctagagagcacacatacacatgtacacttgagcatgtacgcacatacacacatacacacacatatgcacacactaccattgaggcctcctgttgtgaaccctgacattggtttttaacatatgggttgtgacccctttggaggctgaacaacccattcacagggatcacatatcgtatatcctgcatattggatatcctgcatgtcggatatcctgcatgtcggatatttgcattgtgatttataactagcaaaatcacagttatgaattagcaatgaaataattctatggttggggtaacaacatgaggtaccatattacagggtcccagcgttaggaaggctaagaaccactgctctgcagtaaagtaggtttccctagccctctcctgcccagagaataaataccggtcaagtcacatctctagcttaggaaatcaaaaagagctaggtttggtgttggtaggtaaagggatatatagctggatagtttctcccaactatatgggaactggtcacataaaccaagacgacttccctggcttcagttaggttggggacagaaacactgatgtccataccacctgcatctgctccatttacaacaataattactggtgctcctacacggtaccttctgtgccaggcaccttagctggatcaggggccagcacactatctacaaagctctctttgtgaggcataggcctctgtcgcagatgttctcttctgccactgttgtgccaaggcagcctcaatgatacagaaatgagtgctttcatttgcaaaacaaatgatggctggatttggcccacacaccacagtggaccggtccctgatttagattgtcacagctcggtacagcactgccccaccccagagctaaggagaccatgtgtcaggaggcagcatctccttcatgcccatccttcttcttgaggcagccttcattccgtttaacctaagagccattcccagaggcacatttcgaggcagacttggtcctcccatctgactaaaagctatttcctagggccacattgtaaactagaggccttgcctgaggcagactgggaaggcttaaagattcaagtccctaagggtaaccaagaggaagcaactgaaccaccaaggcttaaggacgtctcctcatcctgttgactttgtggttaagacggtttgaacagagtaggagatggagcctatagtaagacagaaagacggacaggcaggcaggcaggtcggcaggcaagaggcaagtgttgcctcagcatctggctgactacacgtcttcctgtacacatctgtgctgcctccagacctcaccgtggagaagcctctgtgggaatgtccacagctcctcagtccagagttcagagctcagccagaaagtggtaggtaggactcttgtgcttggctgcctggccctccccagccctgctggatctgagaactctccttaacctccagagcagcgttgcctctcctccagagaaacagcctaaaatgagtatggctctctgcccatgtgtcctccgttccatcctagctgtgcaagaagacctgcgcaatagccccccgacccaggtctgccttgtgcatggtagggaaagagcctggctttttgtgagcaggtatctcagaggctcattcctccgccctcagcataggccacgtgtatctcctcagacgctgatctatatcagaagaggaaaaagaagagacagcattatcatttgaggggtaccaaggttattttggatcgagcctccattgatggcgcatactgtttaggttaaaaagtcacaatcccggggctttagagatgactcagcagttaagagcactggctactcttccacagaggtcctgagttcaattcccagcaaccatatggtggctcacaaccatctgtaatgggatccaataatgccctcttctggtgttgtctgaagacaactacagtatactcatattaaataaataattaaataagttcgcaatccctataattccctccaaaatggagctacctcatggaggtggtgtctgtgagcgtggagttgtgcctgcgattggctttaccaagcctagtggattgtagatagaggggttatgagagccatacagaaaactgagggctggtcccgggtgggagtggcaaccccgtcatgagccacagagcccctgccgtcctgtctggggaagtatccattaagccctcagatccaaccacagcctccgtagctggtgcagaccaggctgtctctgatggcagcagccccctgagtaaccagttgactgtggggccatagatggagccccaaatcagggaatgtcctggaaggaatcaggagaattcttggtgcagcaggagagcaggattggtcctgagtcagggattggtgtccaagggcagagatgatatatcctaccatagaggagtgtggtcctttgaggagaaggacaatgatgtgtctgcctggcttttcatgtggccagagcagaattcagcaataacgtgagaaaagttactttgcctggtctcttctaggctagaccagtagtgactcttctaggctaagcagactcccttatagttccccccaggaagttgtgaccagtccactcttcctttgaggcctccctcttatctttagagtcctctgcccatttattggggtcttccttatgggggtaaacagcaagttgaggtcccagctagaggttgccaggtgatgctattcagcaaagccacttgggaaaatgagtccatattactctgtcctgtgagcctggatcaaccccaaagtgggagcagccaacaggggcccacattaggcccactggaaaacagaccacaggtcccaactccatggttcccagggtgatgggggccctgcaccagtccctttggaagtatatgaggacccaggaagtggtcaggagaggaagcacaatgcctcttacaggcttcaacgtgggccaagcagtcaaagaatgtatggtctagttacaaaacagaaagtaagatatactgaaaagcctgtataataacaatatagctatgtatgtgcttgtatgtacacacttgtaaataagcatgggtgtgcatacatagagttaagtatgtaatatgcatgttatatatctacccatgctgtatgcttaaatccatatatgtatgtctctacgtctatgtgtgagtattgtattgtacgtgtgtgtgtgtgtgtgtgtgtgtgtgtgtgtgtgtgtgtgtgtgtgtatggttgcatgtgtcacacataattaacacaatgcagggacctgggtttaagagagagaaggctttctggggttaactgggggtcaagcagctttcctgatctgtcccttcagtaagctgggggcagaagacagggggtgatcactcccaataattgacaagacagaagcagaaatccaggcaggatttactgcttggtgcagttcagggacagtaagcaggctgcccttgttcagagaaccctttgaggggcttcaaagtgcaagcagctcagggaggtgaatgtaaccagaaatacatcagagagtcagagccgtgtaccaatctgccactctccccgaaatgtccccaactcaggtgtgcaggcggcatgttcatgggagcttgtccctgacatgggcagcagtagaaaggccagaagcctgtggccttgggaagagggagagaagaagatgaggctgcaagctgccatggacactaagctaggagggagaggacaccattcagaccacgttcccgccgcttgctggaagcttcagattctgagttacacacacgcacatgcatgcacacgcgcgcgcacacacacacatgcacagacacacacacacacacacacacacacacacacttcccctaactctggtcagactacggactgtgggatgcttgctgatgatgcagttcttccaatcaaaatagacggggagcggaatctgagacatccaggcgctgaagtctgctgggaaggtaggcgctccttgccctctgagaacctgcagtgagcctggctttggatgcagggcagagctagcaaacggtccaaaaaatgtttacagagggaagagcggccgagggcagggccgcccgtgatcccggatgtcgtgggaagtggaggaggtggaaaggacacaccagggtggtctggtggttgggatggccgtgttcctgggaagagttgccacaaagcattttccccggcttctccatggcagcgatgttgcttcccagagtgttatgaaaacctgctgttacccggcagcctctctggggggaagtgtccagatctcctcttctgccttccaacatacactgagtcaagacagggtcagtgcaggaagtgggtccctctccacacttctcatggggccgtggttaggaacgtgaggactgggaaggtgaaggggacttctggctggatgccacaacttctcccgcctggcaaaggcaaccatccatcctgttcacagcatgctctggggaaatcagcagttccatgacatggctggaatctggaggcatgctcggccttggcactgagtgggagccagagctgtggcctgatcctgggagcagtctctgggcaggaaactgtgacgtgtgccttggggaagcggcacatgccgggtccacttggggatggctcggctttgctccctccagctcctcctatgattttccctatgggacatatgtgtttcctggaatcctgccctttacacgtgtgggttgtaatggaaggcatggagggagagtggagctctctggaaaggtagccgcagctccagttttcacagtggaggaaaaagtaaaagcaggcctgcgtcgggaactttctagagccgtacaccttggctggtgagcccccagaagcaggaagggatgtagggagtgccctgtgggtaggccagtcatcaggtacttagcctcctcatcccaggaatggtcttcagtcctctgccatctgactaggtatccagggcatggtgccccatcagcatttaggcagctgtgtctccctagagtcccactggtgttcctgctgattgtcattgctatccccacaacccactctatggttgtcacccagcagacccatgcctccctactatgtgtcctgaacagccgcacacgagagctgtggccttgcctccctgccctgctgctccctgtggcttggnnnnnnnnnnnnnnnnnnnnatgtgtttcctggaatcctgccctttacacgtgtgggttgcaatggaaggcatggagggagagtggagctctctggaaaggtagccgcagctccagttttcacagtggaggaaaaagtaaaagcaggcctgcgtcgggaactttctagagccataccaccttggctggtgagcccccagaagcaggaagggatgtagggagtgccctgtgggtaggccagtcatcagggacttagcctcctcatcccaggaatggtcttcagtcctctgccatctgactaggtatccagtcctccaccatctgactggtatccagtcctctgccatctgactaggtatccagggcatggtgccccacaacatttaggcagctgtgtctccctagagtcccactggtgttcctgctgattgtcattgctatccccacaacccactctatggttgttacccagcagacccatgcctccctactatgtgtcctgacagccacacacgagagctgtggccttgcctccctgccctgctgctccctgtggcttggccaggaataggttggagttgccctctatatgtggtccctgttaagccagagtaagcacatggagacaccttacccggtaccagacacttgcccttggcagccctggactacaacttgacacctctgccgggcaatggcggtgttgtctgaaaagccccaccccccacatcttaagatcaaggtcttcaccttccaagcaggaagaaaccacaagatcacacatggttctcatagcatacctacgtgaaaggtcattttcgaccctaactaaaagacgacagccatgatagcgaattgtgaacaatatatacaagtaaattcttaaaaagaaaagaaacctattctagtgtaaaaatgctacgcaaggaattctgggaatgtttgaccattagggattccttggctccaccccttctctccacccacatccaggtcatcagtgattggtccagcttcaccttgaaaacaaacccccagcttcctgtctctgtaaggctaccccagagctctgctggctggctatcatgagtctgttcctgtcgtcaccttagtctctttgcaactgccttttaaatgtcatccagacattagttcccccatttcatgtaggataaatgacaaagtctttccaatgatttaaagacgaggtggcttttatcacttctctgacctttgcttgggtcacgctgaccttgttggagatcttgaacacgtgagtgagctcctactcccgggcctttgcactaacacatctacacgtatcgtgcctctctctccatcctggatccatggctgtactccacttcctcaagtaactgtccaatgtcaccttctcagtgagacctatcctaatctgtctacccgaaagggcacccctagtagagagggtccccagcagtgcacattcacttcctgatccctcttcttgccttccttgcctcaaagggcttcatgggcttcaacacaggggtttgttctctacagaacaacagcttcctaccaagtggtatgtctacagcacagccatggtcaggttgctccagtctcccccttcagcaggctggttcgtggtggacacacaaggagcctttgttagatgcataggcaaaaccttgaccagcctgctcaagtcacctccccttccctcggggcatttcagctccctgtggtcctactgccaactggctagattagtggttctcaacctgtgggtcacgacccttttcagggttgacagaccctttttacaagggccacctaagaccgttggaaaacagatatttgcattacatttcataacagtagcaaaattacctttatgaagaagcaatggaaatgattttatggttgggggtcaccacagcattgaggaactgtaattaaagggtcccagcattaggaagtctgagaaccactggtctaaactgtccttcctgcatcttcccaagagcgaagaggaagcaatctttcacctttgtctaggtggaggtcccctgtcccttaggtccctcctcttccctgggctcactctgacagctctggtagccagtggttttcattcacatctcagcagctgcaggataaacttggctcctcctggcctcgctacttctctaatcagcaccggggactgtgagcaccgagcctaggcaaaaacagcgaggggtggaatttgagggacaagtcaaacacctgagctgagtgccaggtaaactcttcctctaatggtgtggacctggacagttcttcgaaggacagagtccctgtttgatgcttctgggaaaatattcagttgacctggaaggcttcgtactctgttaaatggataaagagggacagaccacaggcagctctgctgcagccccaccctgcccttctgatctggcttgagagctaacttcgaagccctctgcagtggctgtgccttaaagagacaaagtagtgctgtcacctacggctcagcagtgaggtcgatgaagctgtgctgtagatatggaaatccccagtatgggtatcccctccaactattggcctggcagaagtcaggccctgaagagaccacaggaagctgacaggcacagctcggtggggagatggtgtccaagttgtagacacgatccattaatccccagatgccagctggctcctgggtgcctctggccgaggtttcccaggcctgcctgctgagcttcatcaatccccagagagcacagaagtgttggaagaactcttaacaaattacatgacgcacgctctgatatgcagttcacacacagagaaactaaggcagacagttgccacataacttgttccgtgagacacagtggagcagaggtccggctgggacccagtcccttcttcctgtccagcatccgggacacaactgtcctggcctgctgaccccgccccccgccccgcccccagtcagcacagccgtggagcagtgtctggcttccagagagggcttcttccaagatggcgcctgtccttcccatctcccttgtgggggcacccaaacagccaccagccagtggattacacagccagtggattacacaggaaccactctggtggtttgaagcttaagagttttaaaatattttattagtagtcaaatatttaaaatttttcccatcatgctctttggttaaggggaggaagccctgaagagcacagatatgaaaagcctgattgccaggctgaggtgaggataattctgctctttcgatgtgaggtgttctgcccacgtgataatgacatgttgttttgaaacttctctgtagaaaactgtgatttttttttttttacttcataactcatttgtaataaatggagggacatacacccctctgactaaatgggggaaggtttaattttatctctatgtatgttacaaaagagtgcattgccatgcatgttggtgtacatcaataaccctagcactctagaggctgagggggaagaggctaacctgggctacaaactgggacagtttctccaaaacttaaaaaaacaaaaacaaaaacaaaagattatgttaaatatgtgtatcataattcccttctacttgcatatcaacctaaagattgtatttgatatcaaatgacttcattatcctaatagatttttaattccaaagagtgtatacaagatagtatacggctgtaaattgacttttccagtctaaacggccagagcaagggcagacagaggtcactcccaaactgcctcaggtcccacacgggtaaagacaactaatgaagagccttcttgttcccacccacccagtagcaggtctccagatgtgtggtgtcgcacacactgtgtggtgcaggtctccagatgtgtggtgtcgcacacactgtgtggtgcaggtctccagatgtgtggtgtcgcacaagcccacactgggatgcagggttttccttagttcatatgaaagggaaagcggtgtgcaacggtggatgccactgtgcagggtcctcccaggtcccttcagaccatacctgtcttagacagggtttctatccctgcacaaacatcatgaccaagaagcagttggggaggaaagggtttattcagcttacacttccatactgctgttcatcaccaaaggaagtcaggactggaactcaagcaggtcaggaagcaggagctgatgcagaggccatggaagggtgctgcttactggcttgcttcccctgtcttgctcagcttgcttttttaatagaacctaagactgccagctcagggatggcaccactcacaatgggccctccccgcttaatactaattgagaaaatgccnnnnnnnnnnnnnnnnnnnncacacgggtaaaagacaactaatgaagagccttcttgttccccacccacccagtagcaggtctccagatgtgtggtgtcgcacaagcccacactgggatgcagggttttccttagttcatctgaaagggaaagcggtgtgcaacggtggatgccactgtgcagggtcctcccaggtcccttcagaccatacctgtcttagacagggtttctattccctgcacaaacatcatgaccaagaagcgagttggggaggaaagggtttattcagcttacacttccacattgctgttcatcaccaaggaagtcaggactggaactcaagcaggtcaggaagcaggagctgatgcagaggccatggaaggattgcttcccctgtcttgctcagcttgcttttttatagaacctaagactgccagctcagggatggcaccactcacaatgggccctccccgcttgatcactaattgagaaaatgccccacagctggatctcatggaggcatttccccaactgaagctcctttctctgtgataacaccagcctgtgtcaaattgacacataaaaccagccagtacagtacccaatacatacccatatgtcactgtggtctgtagaccacagagccccagagagcatcgtctggagataggagtccttttctgtattgcacctctgaggtgagtgcctgtctaggaaatggaaggggtcacatggtggctgattccactatattttatttggtttgcctagaacataggaatctaactcaagcaaaattcttgccaagcctttgctgactcggccagttcttccagcatgttctctccacattccccactttaaccaaaaagttttgatagctgctattccagaatctccgaaaagttgggtttgggggtgttacttagtcggtagagtttttgcctagcatgcatgaacccctggggtttatgcacttggtgaattcaggcacagtggcacatgcctgtaattgcaacacttgggagttaccggaaacatgatcaaatcttgggtcatcctcagtcacacagcaaatatgagagcagcctgggccttaccagaccctgtcttaaagagcaaataaacaaacgaaatcccagaagagttgtgagaagcataaaggcatcccatctcgccttcccgtggactaccgaccgaccgaccgttaatgtcgcctcccctccttcatctgaattctttcctggtctattggtgaactgcattgccaaaacaatggcccttttctgccagatacttcacaggctgttcctgtcagacaaagactttttcatgaccacaatacaatggttaggatcagaactctgagtcctgtccactaaggtacactaaatctgtgctataacccattaaactctgcagtcctacagtcttcccagacacagggatcctgtctgtctgttaacctaggacaggtctctggcctccgagaatcatggccttgactgtgctcagggaggacctatgtctttgtagtcagcttgtccccaggtctggctccaggcatgtgttcatgttctggtcatcctaccaggaggtggtgctgtccttggctcctgggttgattgtgttacctggttaaaggggggtgggggggggctgcctgctctccatcgtcgagggtttccctgtgtggttctgtgggaaggtcactggaagctaccagtgtttggccttttaccccacggtctccattgatgcttcatgcccgaaacggttgttaatatcaaggttaccaaatcatttcttaatttcaccattccttctaaatatactatttggctttatatcataaagaataatcttaggctagtgtgtgtgtgtgtgtgtacctgtatgtatatatatgtaaatcatgtatgtgcccttggaggccttatgggtaataggaaccaaatctgtctcctctacaggaacagggagtgctcttaaccgttgagccatccgaccagaacttttgtcgtttgttgtgttgtttgtttgagataaagtctctcactggacagcagaagctgattctgaccttgtgatcctcctgtctctgcctctcaagtgcagggattgctagagtacagaactgtgaaaccaagggtctcatgaatgccaagcaagtgccccaaaaccaagccccagcccctagaaagggaagtccttgtcactcatctgcgtgcccttgaacactcccgcttgactgaataggaattccaagtaagtgaaggttatagcttcgtgtctggtgcaagtccctagtgttctggaaggctctgccccaagaaagtatcttctgggaagcatgtccccaggtggcctgactggagagaggctgaggccatgtgtgagcctgttgaaggtcctttggggtcatgtctcaccacagattcatccttccatcagctccaactgaaaaatgtgacccaagggaggcgctgcctcagtcaacgccattttgcatttcctctccttcctgggatggaacaaatggcccttcagggacagtgaacctgtcagtaatgaaattgtgagaggaggcggctgtcccgagagggaggctgctggggtgggggtggctaatggattaatgtagtggccagcagagcctgggaattcctggctctccccagcccatgaagcccaaccagcccccaagcctgttagagccccttgagatcccatacctgcagggcatttgcttcacctaggaaaaacccagagccctccagtcccacccataacctaagatatcctccatgggtgttctgaggctgccagacacacccctgtatccatctatcctcggaggccctgggtaccagattggctcctggaacgtgcctgcctgtacctgtctctcaggcactatgtttgagatctcagggtcacaacctgtttaccagataaaatcctctaggttaacctgggagctagctgcaaagcttccttccttctctgagagtgtgcgcatctatcaacattggccttctgtctccacttatgagtgagtctctggcttggttgcaagcagaccctctctctcatgtcttatatggtctccctctctgtctcttgctaatgaacagatgggactggaagggagtgatttgtgaggatggtgggcccttatacagtaagtgacaaccagagagcaaggaggggggacttgagtgtggtctcttcatccacagagagttagtatagacacacatagcccagaaccagaccctgacccagagcagagctacagtttctctgaagaatttgaggtgattcttctgctccgcttctccatctccacaccaaccactggtatctctgcagctcacatgcacacgtgcaaacacacacacatgcacacacgcattcacacacacagtatctctgcgcctctcctcttacaacgcttttcctgtcctgggtgtcttcccaatccctctcccttccctgactacatcctcagagctcaccagatgtcaagccctgctattgttggtagacttccaatgacctaacagtgctgcctgtattttttaagattatgaagtcggggatattgtcttgtagctacgtgagatacaccggatgctgataacctgagtcagaggttggaaaggaatatatggatggatgcaatctatggtctcaggcaaggctagcccagaagacatactcatttctttcagcagttaaagtaccaactgttcttgcagaagacttgagtttggttcctagcacccacgtgggacagctcacacctgccattgtggattaaacaggcatgtgggtgccaccaccggtagcaagcacttctatgtgcgtacatcctcatcccctcattcacaggagacctgtccccagacccccagtggggaactgtaactatactgcattttctctgtgctacaatttgatttgtaaactaagatcaaagaaatgaatagcagttgataggtgagaacccttataaaaaatggattctagtaacagctctgtgtgtcctattgtgccatggtctccctgcatgtgtgcctgtgagatgacaaaagattctgtgatgagctgaaggaagcctggcttttgcagtctgtggttccactgcaaagctagcccagacttaattgttgttcaatttcacatatagatgctccatgcttggtgtagttcttagctgccacaaaaggttttattctctttccttattaagaaaaaaaaatctaccttttttgcttagctgttccttgcatcactgcgtggcctgtgtatgagctctcaagctatgagataatcactaagaaaacttcttgatcatagatagtacagtcttctaactattaactacttggtatctaacgggtaggtagtatatacggtatggatatatcacagggactatttatgtcccagttgggacagaacaggagaatagcatgtgactgaaaccctgtgggttgtgaactctagggtttttcattttgcattttgcttaaggtgtgtgacttaaactgtggagagccaccccgcaggtgaggtagcactcgtagggtctggagacctggatacaagcaagcaagcaggtataagcaatgaagagaaatctaacatgctctctccagtccatgggtcacatgtgctgaccacacacctctgtcggtagcgcttctcctccagcctcaagtatgggatggaggcagagactcaaggggttgaggcatgcactgatcagagagaaaggcttagaatggagggcatgcttggtatctcctgaatgccagcccacctggtcccctatgggggctgttaactgttggaagaattacacaaggagtcacccctggaaatatattctctatttgtttacatccacagatacagtgaggactgagatgttaaggaatctgctcagggttacagagctggacttgtgctgtgaagatttgaacttagggagtttggttccaaagtcccaattttgaataactacatagctcaagaagaataactatatagctcaaagatgcataggccttgccaagcagcctgcagcgaggggccacagcctgggtttggagacagcaaagtgtggctgggccaagtggaagggtgagggccttcccctggaacctcgccaccaggttcacgtggagcctgacagctcccaagggcagccacgtgctcttcccatgacatcataccgcctcggaactttgaggccaaggattcttggaatgcttgattcatcctggaacaaaaataatactgcgtatttataacgtgcctttgtaccccaaaggctttcctgggctttatttcattgaaagttcaggctagccttgtgactacacaggaatcagagaggcggcaagccaccctgagcagcaccgagcaagattcccactcccccccccccccaaacccctcaccnnnnnnnnnnnnnnnnnnnncaccaagcagagtatccatccacaccccccccaacccctcacccctgtgccacagctagaactgcgtggcttgccagagttatttagcaaattcttgagaaataaggtgcccaagaaccctgatttccaacgagagcgagatgacaaacagggggtcatgagccaccgagtttccctgggaaagccacttccttagcttctgccctgccagagatagagcccacagttctgcatccccctccccgcaaggggcaataatgaagccaaagggccaccctgaaacttggccctggctgtatcccccaggctccagccacaagcaccgcagatgagatgggcaaaagattgtccccagtgcaattggaacccaaggccatgcatggctcctgtggtttgccccagacacagtggagcccaggctggaaggctgttttcctcacaagccgtccttcccacaggccctagcctggctgcccctacccttggtgcctaggccttttcttctgtgtgtctagctcttctgtaccccacattgtctcaggatgacccgcagctcctctccctgtgattttggccaaagtcctctggaatagtggttttagtgtctctgcagcagcttgccagctcccctgggcctcgagatcctggaacaaacttgaaacttgggccaggaaggcgtagtggtcaagactgtatatgcaggggccagactactaagttctaagccaggctcttctggccacttgcaaactaggacaagaaaccctctcatgccctgctgacctcactgcaaagtggagtacgcaatggtacctctccctgagggtaagtggaagccattcctggcgagctgtacatcgagtacgatggctggttttgccactgtgaccctgctcccccgaagtattgagttggctgttacctttggaagccttctgagcaggcctggctacagtgtgttcagcctgcacgctgcataggacaatgtgcttagaagggcctgtggttgactgaatgctaggctgtgactgtcatgatctccaaaattctttgctctggaccccacatgttacatgcaggcctgccttcagtcctgagagtagactgagcccttctctctgcttgcttgcctttgtctcttgtctctggtcagagctacttctagcttctgtaactggtggactgatgtctctaagccctgatataggcattgaagtagcccacttgtgattcacgaaaccccaggacatccagagctgctgtttctttgggcaaccacagaacaggctggtaggagtcagggtcaggaggacaggcatagacagtgaccatggtagacatcaggagtagcagggctctgggctgacttaactcctgaagggaatggggcaatgctgaaagattgcacaggaacactgaacaccgtctgccactcacacacagccctcaaaggatgcttcactaaacctggtgacagcctgaattaacctccaggtggagccaatttaaataagggtgacccgaccacagttggggacaggtgttttctctggctacacagtgctcagggccagtaagaccctccacaagacaagaacatctgttggcctggtaaccctcaggtattcaagggttcatttcccacagtgccatgtcacacttctaaggagactgccttccctgcagtaaagataaagaagaaagccacaaagtatgggcaagtctacagcacagtgtcaggggaacaggagggttccaatgcacaatagccttcatgggggagcaaagcatcatgggagttcctggccgagtttcccatcatcctgtaaatggaagctggagtggctataggttggctctttgtttctgggcctcgggtaccaactctaggcaaagcagccctgtcctgcagggaaatggctggaccctgagcccctgagtttcaccacagtcgtgcaaaggaaaggtcctgtagaggtaggcaggaataaaggggcctgtgctgtaacgagcaatcatcacttttcctgaagacaggaaacacaagctcctgtgtagcttccaagtcactcgcccaggaattttactttcagaatttttaagcagacctacaaattatgtggtaaagggtcccacatggagagaactataataagccaatgggccttggactatctgtttgggagctattatgaaattaaaagaaaaaaagaaagggggagagagagagagagagagagagagagagagagagagagagagacatttgtctccatttagcctgatgttaaaaccatttttaaaaaacaaaattcgaagttactctctatacacctacctcccaaaatgcagctgtggtgtgttctgggaacatttttccccctagaagagtttttagaacaaacccaaatgtctgatttcagaaccgaaagaagacagaatcagctaattggattgtaggagcatgctctgaccattttcattccaaggccattctttttcttctagcagcaggtccatccagggggctcacgtggaatcttgctcttgtccccccaagccatcccttcacctgggaacgagagtcagatcaccccatgaaaaggcaaagcagtcgacactcagccttggacacttgccctttctggcgactgtgctgccaagttgggtgtatgcacagtgctcccccaaactggaccacgtgtacacgcatctgacaatggatgcagccttcttgctcacccacttctaggagtagacgcgactcaccctgacctagccaaacccaaacccacaggtctcgtggggagcagccagctggcccctgacaaaggtatcaatgaaacctagcaccagcaaacactgaagagagcatgctggctttggccagctcacccagctaccactaatgaatatttgtgaatggccagagcagggagccctgggccaccatggttggggaacagggcccaagcctacgtctgtccatgctaccgatggccctctgggttccttgccaggcagagtacatgggcctactgcggttgtttccacaaaagtctctgggaattcagccccgtactcctgggaaactggacctgcgacgaggtgaggggcagacggaaggtggccttcctggtcccacgatgaataagtagataagtctttgaaagcctcgatgggcttatctataaaatgagaagaaaggaggctgaggactccgctcaacaattgggcacttgcctagcgtgtgtaaggatttgagtttcatgcccagcatctctctctctctctctctctctccctctctctctctctctctctctctctctctcacacacacacacacacacacacacacacacacacacacaaggaaggacccctagtccacctgcatacacagaagacaagcccagcagtcacttgtcctgagaagaaggcaaacttcatgccgcatcctctaatgctgcctgtgctcctgctcagtttcccaaggcaaagctgagtcacctccaaagctctgtatccctttggacttctcttagctggggtgactgttgctgcagttaaacacccacggccaaagcagctgggggaggaaagggtttatttggcttacatttgtcatcattgacggaagtcaggacaggaactcaagcagggaaggagcctggaggcaggagctgatgcagaggccatggagagatgtttcttactggcttgctcccccgatgacttgctcagcctgcttcttatagaactcaactcgggacccagggatggaactacccacaatggtctgggccttccccatcaatcactaattatgaagatgccctgcaggtttgtctacaaaaccatcttaaggaggcattttctccattgaggctccctcctttgggatgactctagcttgggtcaagttgacataaaactgtccagcacagttaggagaaagggatccaatggcaggcaacagcatcagagacagtgtctgctccagttgttagagaacccacatgaagaccagggcctcagtgggagaagacctactgtgactggatgtcccaagggggggtggtaccaagtgggggggggctttcccctctcctcagagaaggagggactgggaagagaggagtgatggggggggggctgtagttgggatgtaaagtgaataaactaattaagtagaaatacttgccagcacatagtagggctacttagcttccctctagtctgtggatgcccctctttactcgtaagacaccatcacccagcaaatatgagtctggggacaaccactacagtcagcacactctcagccagtaccattctctcagggttgggggacagggatggggggggatcatattggccatctcaggtcaccccacatctccaggtgaagaatagtgagaccagggtgaattttttctaaagcccttgatggccagccatgtagaaatgacgtcctccttcaagaagacagaagtcttttgccttttttcttttcctactcagagaggtagctgcaggacnnnnnnnnnnnnnnnnnnnnnnnnnnnnnnnnnnnnnnnnnnnnnnnnnnnnnnnnnnnnnnnnnnnnnnnnnnnnnnnnnnnnnnnnnnnnnnnnnnnnnnnnnnnnnnnnnnnnnnnnnnnnnnnnnnnnnnnnnnnnnnnnnnnnnnnnnnnnnnnnnnnnnnnnnnnnnnnnnnnnnnnnnnnnnnnnnnnnnnnnnnnnnnnnnnnnnnnnnnnnnnnnnnnnnnnnnnnnnnnnnnnnnnnnnnnnnnnnnnnnnnnnnnnnnnnnnnnnnnnnnnnnnnnnnnnnnnnnnnnnnnnnnnnnnnnnnnnnnnnnnnnnnnnnnnnnnnnnnnnnnnnnnnnnnnnnnnnnnnnnnnnnnnnnnnnnnnnnnnnnnnnnnnnnnnnnnnnnnnnnnnnnnnnnnnnnnnnnnnnnnnnnnnnnnnnnnnnnnnnnnnnnnnnnnnnnnnnnnnnnnnnnnnnnnnnnnnnnnnnnnnnnnnnnnnnnnnnnnnnnnnnnnnnnnnnnnnnnnnnnnnnnnnnnnnnnnnnnnnnnnnnnnnnnnnnnnnnnnnnnnnnnnnnnnnnnnnnnnnnnnnnnnnnnnnnnnnnnnnnnnnnnnnnnnnnnnnnnnnnnnnnnnnnnnnnnnnnnnnnnnnnnnnnnnnnnnnnnnnnnnnnnnnnnnnnnnnnnnnnnnnnnnnnnnnnnnnnnnnnnnnnnnnnnnnnnnnnnnnnnnnnnnnnnnnnnnnnnnnnnnnnnnnnnnnnnnnnnnnnnnnnnnnnnnnnnnnnnnnnnnnnnnnnnnnnnnnnnnnnnnnnnnnnnnnnnnnnnnnnnnnnnnnnnnnnnnnnnnnnnnnnnnnnnnnnnnnnnnnnnnnnnnnnnnnnnnnnnnnnnnnnnnnnnnnnnnnnnnnnnnnnnnnnnnnnnnnnnnataatcatcaaagtgaagattgatattgaacttataacaaagaagcaaatgtttgatataaatccaatttgtttattaaggataattgcacttaaggttgtgagagcggaggtagatctcaaggtatgggttcattcttgaaactgtaatggctttctcttggtttctgcaccactgtatctatattaaggggcacgtagctattctcaactgcacctccagtgaccccagggttcagaaggcagcctgggagggaccgaaactggccatagtgctgtgagtggtaagacaatgcctcatatccatgcgcctgcccctgccttccaaccatgcagcaagaccttcccatcttggttcctggcacagagcgcagctctgccactggctcttctctgcttacaaagcactgtcctgaagctaaggagcagcgctctgcctaaagctgcagaggtgtcagcacagtggggctctcctgagacctcacttctcagtttgcagatgaccacggatgcctccgcatgggtggcatctttgtgtatgtacagactgcttctcgttataaggacccaagtaggcttggattcaggggcacaccctggcaacatcatatctttaaaatcccagttggctccagagagatacattctgaagaatggagtgagggcttcaaaacgtgaatgttatcagataatgctgctttcaagggacatagctggaggagttgggcagaggctggggggctcgtcacatcttctgctggtccttttagatgcttgttccgtattacatacacgggcacaccgtgtgccacggacgaatcgctgctttttagagaaagttcaacttccattctctctgatggctcatgggagggtcgggataactgttgaaatgatccagactctgatattgtgctccaacgtttggatgaagggaccctaccagttcactatgtaacccctcttttccacctctccattctccttcgtagacggcagcaaagacctccaggagggaacaagccccaacagcatggtgaccatcagccaggcagtgccaaacacaacagggaccaccagaaatcttaccaggggggctcagggccccacccctcggggaggcccacacaccatggctacagccagaaccgacgctggcatcacggcaacatgaaacatccaccgggagacaagggagaagcgggcagccaccgcaacgccaaagagaccgtgaccgttgagaaccccaaacttgaagacggcccaggggacaccggacacagtggccttgagcccccctgcagccctgacactctgaccccagcagcttccgagagaccaacccctcagctgtcaggggggccggaggctgagataaagcataaagacactgttcttcctgagcgtctcagggagcggcccaaaatcaccctgctccagtcttccaaagacaggctgaggcgaaggctgaaggaaaaggaccgggtaattgccttttctttgttctctccctgaggacagctgaaaggtcggcacttggggggtgggctttgggtggagcctcgtgggtcgagacaggggctcctctctaaagggaagagaggctgggtggacacaccacaccaggttgtcaccgccatgggtagccagctgtacttgaaacccttccaacacatactgttcctcctcttctgccccacaagcggtgttggagacgccgggaaatcactagatgccgtggggaatggagttgggtcctatcggtcctgctcagggagtcttaactttctctgaagaggtggtctagaggggactagaaaagaaaaagagcggtcacttctgaccccaccctccccgggtcactcagttctcgagtgggagagcagctgtttgtgcaccttaatcccccccccacatggtcagaagaggctccagtgttctcgcagtgtccccgtgtcaccccaaggggaaagtggctcagagaaggatccacctccccagtgtgcacagccacagagagctggagacagagccgtacctccataggaagctcccaagttaagaacagagggccagcaagcttgggccatgggtctgttctgtttaggtgcatacagtttaagataacctcatgccattttctgcctttccactctacagtcttaccccagttactggacactctcctacgaacataaacaagttgggttgggtttgtttgggttttttgtggggggttgttaatttttctcacaaggcaccagccatgtgaatagcacattgaaagatcttagtgtgcagtatctgtatgcatagagacaggcagtatgggatgctaagccagggccaagtccacatggatccgttcacctaagaacatggcggtccgtgcatttagagcagacacctggtagctacacccaggccaccccagcaccactacatgtgttctggatcctactcaaccccagcttggtctccctcacctcatttcctctttgacccagttttctctctatcatcttcatcttttaaaattcccactaaatcatctctaaataaaggggtctgctggatacatgaggggtaaatgtgtatatgggaatcctgggtaggggctagaactgacaatgtcaaccagccagggcatcagaggagctaaggaaaaaggtctgtgaagtgcagtgtggcgtgtggcgtgtgggagtgacactccctcacatccttctttctggctctcccttcttccttcaggacatcccgaatcccactgagacttcagctccactgaggtgtgttttatgtgtcccccatgtcccccaggacgaagtggcagtagagacaagcagccctcagccaagcaagatggacaggctgatggaaatccttaacagcatgagaaataacagcagcgacgtggatgccaagctcacctccttcatggaggaggcgcagaactccaccaactctgaggagatgctgggggagatcgtgcggaccatctaccagaaggccgtgtcagaccgcagcttcgccttcacggccgccaagctctgcgacaagatggccctcttcatggtcgaggggaccaagttccggagcctgctcctcaacatgctccaggtaaccggacaccgacagctgccgctccactccccggcccctccgactgacgacgagggttattgctagagagagggctgcaagttctggtggcagatgagcttgtcccaagttgcttcctcccttgcctgattaattatagaaaataagcaggcatcaaggggtgagagatgcgcggctggatttgggtgtgtttgtgtgagcgctccatggttacagaggaccaatataattttataggtgctttttgttcaaccgccctctctctctctttctattttcatgataagaggctggctattggccctgtgctttgacctctacgtgtctgtgcggtcatgaacttgctgtggacctggctctccccgctccttctccctggctctcttccccctccttctccctgacctcctaacttccccccttctccttttccttctccgcctccctaaggacagccctcaaaagcttgatgtctctacccttgtaaagcaaggatggcaaagccttgtgaggcaggacgacgacagcctgtctgtttgatgcactgaaacccaaagtagaaagaaagtgtggcaatccaagattttcttgctgcctggtaccttcccacccaatctgcttcccctccagagagcttcccctcattgtcttactcattgtgtgccaaggaccagtgtctaaccacagtcccattgtagtgtgtgatgagtgtgggccagtgcctaaccacagtcccacaggtgagtgtgtaataagtgtgagcacacgcgctcacactgagtccgttatataagtacctgctgtgtatggtaacagttgactggtgagcccagatctggcaacatcggggaagaaatgacagtggaggatggtgacacggtgaccgtatcaggcccaaaggccatctttggagactctggatgggaaaacaatatctttcctgttattttatacaacagagcccaatttagatacaaattgtgtcatcaggcctacctggtagagcagttccttggaagtgaggaaagagggaagcaggggacagagtttaagggaccaccagcagtcatggcgaacatggtgaccatataccagattgtcctaccagtgccacttctgagagtcccctcataattacactcagaattatgacagatgtgctcagggcactggtcacctggttcatggtctgcagtgttgtccctaaaagcagaggggagatccctgctggcccacctgcctgtggcgcactgggccccgtgcctgccgtcttcttgtgtgtgcgtctcgctgtctgcaacctgagcctccctggccagcctcgagcttctcgccagctccaggctctgatcgggttgccattcctggatcgcccattgctcccctggtgatgaattcccgcattacctgagggatttgcacataggcatgttcctcgcgggccggaatgtcctgggagagtggagagggtgacaaacaggcaggagaggcccgtctgccgtgcatcaccaggcacgggggagtcaagggcaggactggcctcagactcagtttggtgatttttttttttcttggagaagggtcagaaacagagtacaggagtacaagctctagaccgtggctgccagccgccagcaatccgttcaaccccacagcagacaggcacacaggcctgtggcacccaggaaatgagaactgtctgcagagactaccccaagatgggttatttcatcaagaactcatggcaagaacccaatggcaatttcaattagtgaagtcctactgtgcgccctaactagcatgcccatgtgaagggagcannnnnnnnnnnnnnnnnnnntggtccaggtatcagcagtcagggccttgcgaatgggctcccagtgcccacacacacacacacaccacacacacacaccacacacacacatacacacacacatacacacacacacacacacacacacacacacacacacacacacacacacaaacatacacacacacaccgtgagatgctcctcttcttactgctccaaggcctggccctgaatgaaggagtcttaggttctcctgtccttgcaaaccaccctcccttacgctgtcactcagagaatgtgagtgactttatgaccagccccagaggccagcttgtcccagggatactcacatcctgccccctgctcccctccaccaccactgaccctctggctgcactctagtggataaacccctacatcttacttagaagtcacttctacccaacgctcagcccattgccaggggccactcaaactcagacaccactcccctgggagattggccagagtctctcgctctctgtttctgcagcattctgtccttctctgccacagcacctgtctctctgttctgtcatgtgactagcactgaccgggtgtccaaggacaccaagcagcacctttgaagccaagggtttaaacgtatacagcaaagacaggaactttatctactaacctacagtgacaaaggaatgcgcgttaccatcatcctgcttcccccggactctgacaggcaggcaccgcctctgctgtgtgcaaatctgtgtctggctgtctgctcagtaccagtactgacaggtcacagtcatggagcaatggcgattgcaagaggagggaaccagaaacatctctctcttttctcccagtcaagaacagaggcccaggtggcaaacaagactcacattgtaagctccaaaggtgcaccctcctggtgaccatactagtggggaaaggcctgtgcctaactggacgatttgtggttcctctataggccatccccatcacccacttcctgtgagccaaggtgggagccctccgaagggtagaaccagaggctttgccttgatacttgagcctctggtaagatcgtctaaagccctttaggctcatagaggaatatcttagccgtgctgggtgaggtgcccaagtacccatggatccctgatcacgtggctgagaggaagcttgcttatctacttgagcctcttcaggctcttccattcctccctgcaaccaaggagagcaggcctttctgagaaagtggcctttcatggtcacttgccacccaagcagggaagtctaaatggaggagcaacagacctggggatccacgttccctcttcacacctctaaggaagtctgtcttcaccacccccagaacccctccctcccttctttctccctgaagttcctggtctccaccggctcagtcccacttgaccctgggtccccagccagccccatgttcagcctggcaagctctgagccagtcatcctggtgtctgatatggctgccatacaggctctgaggcccagcttagtggcatggattgcagaggaaccaggtgtgaagtgcctggtacacacccctcccggcagctgtctctggatatggtcctccctggctgagtgctcttgcgacacgggctatggagccctcgatgagtctggagacatggcagggagaggggcaacctttgatgtggtgaatacttggcaatggaagtccaagactcctgccaagttgagcttcagcacccacaaagtggaaaatggggtgtggaagattgtcataggtcctccccatatagactctctcttgcgccatgtcaataaaccagggaacactgattccctcatgagttccataggcctcagtggatgcccatcaccaattccacagtttagcatgtcagtttctacatctgaactggctctagtctttatcttagatatgggccctttcttagtgtgctcatatgtgctcaaaatcctatttaagtgactattccttaaatgtctattatatgcctatagttgtcattagtatcctgtattcctaccaaacttatagcggtgctgccaggctggtctgagccaccctttccggagaggcattggatagtttatacgggaagggtcactttaatgtctgggcaagcaaggcgacagactcttggcagtatggctctccagcctgagaatgctacacttcagacctctctgttgtggagaacagagaccctcagccgttgtctttggggatcacatggagagctatggctttgccctggggtcctcctcaggtctgggcatagacctggacattgtgtcgtaaagaactcatttgggccatgtgaagtgaacatcactgtcaggacgaaggcccagagacaacaggaaaacctcacccttgtcttttaccaactggcccctcacaccaggaaccagctaaaactcatttctcaggtgctaggccctttgctaatcgatgtggaggactcaaactgagctggtggaaaaacaggagagggaaaccttagctgttggtagagtgctttcacctccaaactcgttttcccttctgtgaggagctgggctcggcccatgttcctcaccatcctccaccctggaaagaggagagaccctcttctcctctcccacgggatttctctgtccctgctctgtctaaaccttctgtttccttcttcttggcccctgccatttgtccgcatggtcattatgtgttttaggtgaagggtctccctttcagccccagtgctgactgggccacccaggagaactggcgacaaccacctctgtggctctgccctgcccgtgaggctcccagatccttcatgggccgaactagccagttctgcgcattgtttccttctttagagactgccggctaccccagacccaagcaaccagaaaagttcccttgatgctcaacagggaattgcagttcagttccaggggagagtaagggctccagtttcatggggaaggaagaatgagtgtgcctctttttatgggaccttaggaatgacaggaatcaaaggcttgagccccctccacccagaactgcctggtcaccgccctctgccttacccttgagcttagagagggctcttttgcccagatctgcttgggtagtacaagttcaagccctcgtctgttgaaatgtgtgtgccctgtttagccgagaggtgtctgcatctgagctatgcagagagaagtattattagagcaagcatcagtgtgcctgtaactgaacccagctctccctagcaactgttgctaacaacacatctaacagaaggatgtgatacctttttttttttttttttttttttttgaagagggaggggggaaaatctcttcatctaaccaagtcataaacacagccgggttgttgtgcaaaggcaactggaaatcaaagtttggcacttggccagatttcaaaataaattgttgtccactggtaccctctagaatgtggtatctcaaaggggccggtctcagccttgagaatgggcgttcggagtgtctggccagatcactgttacagcgttgtgtttgggcctttgataccgagagactcagttggacggtaattctatggggtgtctgggaatgcctttagctctataaggattgctcagatcctctgatctggctaaccttatcaggaaatcaaagtcttgccttaagccccaaagattatgtattccctatcacatcccttagaaatacatggaagcctgctttctttcagtccacacctctgtcctgagcccaagtcctaggcttaggtggaaagaacccaggctgttcctttaactgattgtaagagaaagctctcctgccctctggctctcttggtttctgaaaaatctaaaaccattccctgtatcttaaatccagcattcgcaagcctcatattctacagaagaaagggcagggctggccgtggctctggagtggagcagttctgatctgtagacttctcaaggacaagggcgctggctgttacccttctcaggctcctggcaccgtgactggtacacagcagatgctcagaaaatgcctcactgccctggaaagtggtagagcattgagtttgggaccccagtgctttgcgggacagaagcccattcctgtgtgtgattcttagatgggttccccatatcgaaagagagagaaagacagagaaagtagtttagcaaaagccacagctctaactgtctggactcctagctcccatcccattacccaaataggacaaagattgggagcttagaaatagccattctatgaagccatctatggggactgtaaagaacaccccggggaagggcatgattgcctctgcccctcagactttggtaggacagagctgcctaaaagaacactcctttgtaccccagtccatgtcacctccttacactctgtccctctgcctccctccctgcttgctgccacaccttccatggagcccatgtgcattgcaagcatgtaaaccaatattagtgctggcttggctgggcatgcccaggagagaagtgcattgttctgaattctccagagctggagcaggagccttggactatcaacacacacacacacacacacacacacacacacacacacacacattcgccttcaaggctgctggagccagcagggacaggacacagggctagccggcagtgccagccgttctccacaagcaaaccacagagggtgatttccccaggcccaagagtgtctcattttctcaaaagtcaccggcctctgagcaccctcaggagtaggctgtgtccatgctgaaagccaagcatagggaaagcaatgcagagctggtacactcactggcagcaagcttgcttcatgtatcccaagagaccggtggtcacaggaacttggacctttgcagagtctgtggcaggctgggtccctgcctgagggagctgatgtctgtctccatacccagcccttagccatgctggagccagagtaggtcagaaccatataccttgcttcaagtgtcttgtctgtcctttcgagggagtgagtagattttatttgcttttttccaatggtatatgtctccttccaaccttattgagcacctgctgtgtaccacatcctctggtaggccaggtgtatgtatcagttcattacagactctctggtccccttatcactgttgaaaccagacataggtcccagccaggtctcgggtactcattcaaggaaagagatcagtatttaggccagatctctctggctgttcagttgtgggagtggaataaggacaaggtgacttcttgaagcactgagtccgaggctgtggacctctgcagcactgagtggggcagagcaagtgatgatctgagcattaaaacatggcttggacgcctggctcaccgacacgtgccgatagtcccagcgcttgggagatggaaggaggactgtgagtctgagaatggcctgggttatgtaataaagttcaagccagcctggacaatagggcagcacactgtctcaaaccaagcaaaactaggccacctggaacaaatagctaccctttgagtcccaggtctctaggcaggaggacttctactgtggagccagaactaagaccctagggccttaacctagtggtatggattcctgctgccgcctttgctgaacctgagtgctcagcctcatcttggtacctggtttctgccctgggaaagcccctctaagctatggtagagactgaatgagtgaatgtacccacagccctcaactcaaatccaggccacagcggtggctgccccatgggtacagaggagaacaggaggcccgactctctccaaacagaggccacaccgggcttgtgactcacctctcacttccatgcagattcagtatggggtaagacaggtggtaggagcttagaaaacaaggatctcaggagaggcctgaggacttgatagctttttcctttccagccacccaggtctccaggtcagagaccccgcccccaaacttcacctgggtcaaaccctttctgttctgttttgtttgtgtttggccccggggtttcactgtgtagccccatctggccttgatcgggcaatcccaccccccttctacgattagatttgtttaagctcttccttatctcaggcttgtgtctttgggacaaagagttatgaatgtcctgcctccaaatcagtgtagtagttagtctgccgttacagtaggacaaagcagccttgggtagacaaaatagatggcagtcaggtgcctgccgctgaagaggagcacatggtgttctgtttttcgagtcactgggcccagggagctttccctggtcaggcactatttcatcaagacccatgtccctggccgtgccatctcctcttccttgcacatcctcacctcccaccccggctctgttttccctgctaaatcccctgagagaacttggccagaagcatccctgtctgaggctgccaggcaggtcccgcagataagtgggttatcggagaaggtggctcgggtgtcccaggccccagagggtcacccctggctggctggcagttcacccccagcacctcctcccactgctgctccctcacccagccaggcaggcaggagacagcagatcccttcccaccatctgccccaggcagccgctgggaatccgagctatgctaagccactccagatcagcgcatctcagccctgcctgggcaccgccgccccagacagggcgcctctacctgctgcgccaccactggaaagctggcaccgactgcccagtggaaaaaatccccctgcgggttatgtaactgctccccagcctggccctggctacccaccaaggctggccacccttaaccaaccaccacagagggggagtcatgtcttgaagggaagggtctctctttcaaaaaaggaagcaaatagttctgttattgtgagaccctcctctgggtcccaccgggtccttagagactgaaagaacttgaaaagttaagggtacagctgagccctaagcaagaactctggtcaaggaaccaagcagaccaaagccaacaggaaggaggacacggttttggagaggagagaaaaagagacccctgtattgttactttgttcaacattttgtaaagttaccatcacagacagcatcaaccacttgaaccacttgtaaggcaccacctcagcagcagcaaggacacccacagtgccaagcaacctccccgtcaccccaaacctaagcactggtctcactaaacagtagctccacatcccccggccaccaccccaatccctccaagggttccctactctgaatcacacatacgtacacatgtgcgcatgcgcgagcacacacacacacagacacacacacagacggaatcatgcataccacatttctcttctgagtctacttcacatagcacagtggctttaaacttcatctgtgtgatagcacgtgtcgggtttcctctttgtaaaggctaatatgctgttgtatgtacataccttattttgctcctccatcattgggcacttagggtgtttctatcttttggcttttatgatcagtattgctagaggcatggatgtgcgaggaccagaactcctgatttgattcttgcagatatctatctagaggaagagccgttggatcatagggaaattttatgtttatcttttttaagaactgccggatggtttcctgtacatttttaatggaggaaatgtagtgaatcgagatacaacaaaattgcgtgagggagagagagggtaccacctcacccgaaatcaagctgaggacagaaaggagtctgtaaggtgatccaagcagggaatggagaggcaagggcggctaaattaggacctaggagatgatatgggctcttgagctatagagttccagaattcattttaaaatcacagaccagtagatacctgaagcttctatatagattacccagttcaactcactcgtagagatgagagaccagcggcccagggaattaatggagatgtggtggttataaaatactgtacttttaggcagcttacattaatgatcttggtgtgttgtgtttgtttgaaaaaaaataacttgttttacatttagagaaagtgtgtgtgtgtgtgtgtgtgtgtgtgtgtgtgtgtgttgtatctgtgcatgccatagtattattgtgaaggtcagagaataactttcagtggttagttctctgcttctactgtgtgggtcctggggattatcaggtttggcagcaatcacctttatccactgtgccatcttgccagtcccgatccaagagttcggaggggctacggagttgactgtgaaggaagcatgcaaagattgccactcaccctgccaacatctagactccgtatagactttactcccaagccccttgtgggtacactgccgggacctggcatgtagcttcactcccagaagctataagctgtgtagacagccagccagcacaggaaatgtaagtcagtttcctgcccctcagcaagagccccagtggaccctgcgagtttctgaaaggatagactagttatctgaaaatctgcgaagcttccaataggcagacttccccagccaagggcatctaacctgtgctcttgagtagacttcaagccctctggccacctgtgagaggtgaccaagaagagactctatccctccagctacagcccgaatcaggaagtgagtggacaggcgtggatggagaagagagggaaatcagaaggacagacagacagggaacaggaatgccacacaggagggaattctgcgtgggtctccaactcagtgctacaagagtatctgtgctcacctgttcccagacagccaggtctgtcccctagataaatggaggcccctttacacaaaagccagcccagctcccccaaagaaggctaccaagaggtcaggggcgtagtgggcaccaaaacattggcatgtatcatctctgcctccatgactcccacctagatagcactagatgagcaatcctgtaatgtttccttcaatatggactcacctctgtcctggggagaaggtagtatgccaccaagaagcaggcctatgggcacatgaacctgttgtgtcaactaagccctaggaaaccaagatcaagatacaggctcttgcacaactctgggtccccatcccttgctgcccaacacctagcccttagctttaaaccccttcgcagtggaccagaactgggttaggagttcagagcctttagaaacaggccagtgctttactagccactccctgaccctgattctagctggtctccagggaaaggacaagtgtccccattagacagggagccacatacagggagtgagtatcatttgaccctctgtgtgtcctctgagtccccagacaagccccaaataagagagagagagagagagcgatgcttcaaaccagtttgaaacatcgggacagacatgctcatggaaaacagtgcccttatgggatggccacccttgtcacccaaatatccactatcttgacaaggccctgtaggaaacaggtagatttcagagggtctgtgcacttacctgtgaagaaagggcctgcaagctaccgtaccacaataccatgttctcatcagctaagcgaggctagcaccataagaatatgtggcttagctggtatttggagatgaccctgctccagcataagttcctagacactcatagaatatgtatattgagtaattccaggttcgttggcaccttgcgcgcagaattcttacctctgtgggttctgctagaacatcagttaccttgttactctaggtgttcaaaaaacaaggtagccaggcatgtcctcgcagaatttaggaggctgagacagggaggttgatggacttgaggctagcctgggctaacgtagtgagaccttgcctcaaaacaaaaccagtctgattggaataagatctctaaagtgggcttagaagcagagtcctttgaagtcagccttctgggccatagacacttccctcccagtgacctatacttacaacctgtagaaatggccggagcagccagatgctggccaccttcccctgaccccagtgtgattccatcagaacctgcaatcccctaaccatccacttaactcttcaatcagctggaattgtgatgcttgtctcacagcctgctccctgtcccaaccactgcagggaaaaatccactcaacatggctgtgttctctggagacccacccctccagaaaggatttctgaaaattctctagcacgtcttcctgtctccctggaggagaggcccatgctttcatggccccggataagaaaacctgatacccacacaccagcccagggccacatgcacacagagatttggggatgatacagcctcaaagaaagctcttagaagggctaagtgcagaggctcggctggagtcctgagctctgtactgttaaactgcattgaggggagggaggaactggctattctctaccagctgcgccaagcacccagtgtagatgcaccagaggagaaacagatctacaagtgggcggggggggggagagccagggggagtgggggcttcctggaggaggtggccccaaagggagataggaggctacagtcaatgctaaggctggcataaggagtagtctgttggggatgggagagggccagtggggaggtgtgtccagccttggggggtgaggggggacgctgtccagccaggccatgaccctgctggcgccagcttcccacgagatttcaggccaaggctgcattttaatccaaaactcagacttctacctcaggagttgtgagcttcctgccagcttcaggcctgagcagtatcagggggtaggcagcgcagactgctcatctagaacccaggccagacttaggggaggggtccaaatcccagggtttcacctagcaggtggcattaggagcctagcatccccctgggtccggggggagcccctccccacccccagatcgtagtttctgagttccctagaggaatcctgaggagactggatgtctggagccagtcttgcctcgccgccactgccagcctgtgtacctgtgacaaaaatggaagcctgggtaagttctgtccatgagtagcaggctcttggatgaccgctcaccacccactagtgcctggaacttgtgaaagtcagttggaaggcaggggcagggacagcctcagacagtctagggatggaaggtaagataaacttccttggggtgcacttgacagactaacaggagcagggtttagggttcagcactgaaggaagcagcatgaactgcagaaggtgacattctgactgcagaaggtgacattctgagcaaggcaagtagaataatctcagccaatcggtttacccttccaggggcttcttcacccatataaaatgaggaggttagagatggtttcaaaggtcccttcccgcttattccaaagccttcacactacggggccggtggagacaaggcttcatccctaatgtccccagctgggcaggtctgcagccctggctggctctctgaccattcattttcccacatacccaccttggctgacctgctttggccacacttcctttggaggcagccctgagtaaacagaacagcctgcagggggcgccagcacgcaagacgggcctcacctgcctacagtaatctccccaaacccccaaccccccccccccccgcatttggcaccctgggtttaaaccatgtgaagatgactctggcacccaggctccatcacaaaattttacactgggggtggatgagatcctccagcgaggaccatggggacctctagggcaagctaacatctcatgtatttgtagggtttccggaagccaccggcaggtctgagaggtcccaggcagcctaggcagagggtgagacaagggtctggttccccagggacagaatctgtccagagatatcactgtgtctagggagcccagttgccctcggggaccagagcgctaatgagctccatccctggaggctgcatatttccagctcaggcaggtcggactgtctagcactccttgttcttcccagacagcgggaggaggtgtgaggacaggcctggctgtcagcagtcctcccacacggtgacaggagtggacaggaatctcagaggtgaagaacaggcatgagccttgggataaggcagactgcagccccccaggccttcccaccttgagaaggggcagttaaggaaaggggaggagggcttcttccttgccccaggtgccactctctccaggccttgggtggccctagccagcactgccctcctgcacacactacagaactgactggccttaggttcccacaggggcagctgtgagacccctgcatttcaatgccatccgtttatgccagggtctgtgttggatcactgtgtagtatgaaaccctctagtgggacacttcctgaagttattcacctgcccattttgttaggatcttcctaaagtcgaggactagaagacttggaatcccaaagttctagaaaaagtattgtgagcatcacagcaggcagacagtatggtgactcgtagcttttcttttaaagaactcaagggagccaagcaggaagatggatggagttactttgtagtcagctacaagtgtctgctatctacaggacctatcagccagcagtgtgggacaggagctcatactgatacttagctatgtggcccaagtgaaactgtgcctagagcgtccttcttctctgggccatagttggtagaggaggttcgaaccatggatgtgagacctatgtcctaagtgcctacattacagagacagaaaggaaaacccagaaaggccaggaaacaaagccatacagctagtagaaacagtagcaactggggcccgttcacgttcacatcctgcctttcttagaatgtactgccaactgagtacccacagccagaaacacgtccagaggtcagtgaggttcagtgaggtctggtgaggccaggtacgggcagaaggcaggtggccaagaaaggagacaagaggtagagacagagatgacagagtggttcagagcctacaaactaaacagtgatcgtgtgttctccctctgtcatcccgagacctaagaatatgaggaccgctcttggctgaagctcagtgtggggctgggggtgtgagccttcactccctgtctccctggaaagcgggcagggtccctctctatctgtgaacaggcagcaaactggcctggctgggcctcatgaaggcaagaagaagaaattgaccctttcctggcgagagagccaggcacaggaagggagcactggaagctgaagctctggatggcagggaagggtctgcaggtggctgggatgctcttgttgtgtctttgagcagcctgcgtagtcagagccacatcaagtctgcagaaggcccgagaaagcagataatttcccaggtgaccttgttccttgtgttacctgtttgtacacacatttaactactctctttccaagccccccaaggctaagccttaaactgtaagaagaactagagacagacagacagtgagaactgggtactcttaatgattggggaccatgggggtagtcgcacaagcagcccgagttgcccagacaaagagctgccttgtccgaagttttctcggcctctgtggccatttcttttatttttaaacaacccccattgctatgtgatttgtcatgaccttgtccatcgcagtggccgtggctgcatttcagaagaaaattaagtggctcaggactcgaaactggaaagagcagaaggggtctcactagagggtgaagaatattcaatgctacacattactcacatacacacacacacacacacacacacctccctagccttcacttgttagcatatatcgtctccctgcaaacttggctgcccaccacagacaccttggctcctctgcctgataaaggggaagttttcgtgccgtgcacttgagcgtacactgatacaggggtgtggggcttgctgccggctcaccatgcttcctccccctgtccagacagaagaggcagtgggagctacttgacaggaaagtcccagaggggcaaactggccaggggccactcagcctaacaaacatccattgagctcctgtgtatggctagggaaagagtactcgggtagggcccaaggaaggagggacgttcaaccgtcccttccatgatcctgtccgctctggcgtcccacccctccactgtctggcacggttttcctccacttagatctcagaaagctaagcagccgaaaaaatgctccctaggggaagtcactaaaggcaaacccaccctgtcacaaagctacaaagttcctcttctctttctcactgtcagtctccctggtgaccccgaagggctcccttgcaaaagtttgttctctggactttgtgtttttccctatctgcttgaccgtcctagtgcctgctggctcagaccccagcgccagcccctgtctgtccctgcaaacacaagtcagctgtgtgtgcagacaaagcctgcaactccgcgggggctgggccaggcagaagggacatttccagggaactctgggggcaatggctgggagggcagaggcgaccgtctgattagcagggaatcggcgtcacagtctaaggcagagagggtgcgggggctttggctggtccccaggggccagtggctgtgggtggtgaccaggggaggcagccaggctggaagaaatctgctgtttgagaagtggaggaaaccggctggagcggagagataacagcgtgttctctgtgtgtctgtgtgcgtctgcgtctgccggcgagggcgactggagccaggcggtctgaggccgtatctagtgagatttttgttctgggttgtgaaagtgacccatggagccagcagcagggttcagggcctgggagagaggacacgtgtccctggcctcctccccatgtcttatgctggtctcccctccctcccttggtcaaagcgtagaaggctggtgggggggtggggggtggggcgggcggcatccttaatacaaaggaaatggcacaaaggcctagctttcagcttgattgagccactcgttttgacatatgaacttgaatacttcccctaatatttctggctgtctcagtctccttgactatataatggggattatttatatctttccttgtgtagcccactggatagctggagagttcttatgaaataagggtgtgaaaatagtttataaactgtagagtgacacaaagactgagaatgatgggcacagctatgtcccctggtctgcttaaggaagacttgtcagagtacctcgcggtgggaggcagaggaggtagtgccagataaggaccctggggctcccaagaaggtgactccctcagtaaacaggcaggaagggatgtttccctgggtggggggctcatccctagcttgccctcacaaggagcagctggcctgggtcgagcatagacttctccagggacacaagaaagctgaacgaagacccttatccatggtagccagggggtctgccgttgccagggagataagttacaactgctcagaaatgtgggagagcccctcacttcgctctcttaagcctcaactgccaggtcaccttcttgatcccccatatccccgacctggaaaccagccagatgatctgggaactcagaaggagctggcaagagaggcaagactgtgagtctgggagtctgagagaagctgagctatttaaagcatgcagtgtggggcgagggggtgggggtggcgaatgccacctaccccagnnnnnnnnnnnnnnnnnnnnccttgcaatagcttgcccttccctggcccagatcctgtaccatagggcatccacaggaccatgggtcagatgtcccggctctgagaagctgcagctgatacagcataaaagggcagcccagcctggcctaggggcttgggtcctgtcttctgatcctccaggctgagctgatccagccacataggcgccttgatcccctgtgtcttataaataaggctgatacttatattcctgaagaggaatataagcctgcaaccccagatgtagagggccagtgggcagaagtggaactaggggctttgcctggttgctacttcccatgtctgggtctgacttcttagcacactccaggttaatgtaatatcatacacatacacacacatatatgtatgtatgtatatgtattcaatggccagatacctgtctggagttctaagcccttagttaatatttttttcttctacaagtggcctagtcagatacagagtaccactcaggccacacaagcaggaccagctgagagtaccttagcagagggctttccacaaatcagcatacgaaccaaaactgttcttagacgtgtacagaggctcacccaccgctgtttctgggaagggctgacccttgctctgagactacagatctcctactgccttggcactaaactgccttgcttctagggagtgatggatggacattttaaaaggcattcttaacaaagcagtgtttggaaactctcagtttatcagcccaagaaatcatggagcttggaattctggttcccttgccaacactcagctccccagggcaggatgcagccaggggtgctagtgtctgggcccacaagcccaaggctgtgtatccccagcccagtggtaatttcctcttcagagctagaatctccacccacacccaccccctgttctctcaccatgtggcttgaacatgagcatctgggagcccagagatgctctccaggctgctcctggtggcacatgacatgatgacctcattcataggtgacattacttctcactcactcccgtaacttcacatccatgtccccgtgttctattacccacgtggcccagatgtccccacataaagactcctccagtctcaccctgtctggctcacatactgatggacagccttatccacgccgaggtgtgccagcacctctgtatggtagatacatacagagcatcctcgtaacaaatggaaagatcctctcctgcccctgaagccttataatcctacggcgtggggatacagaaagacaaagccactgagcggtgttacagaggcacgtgtgaactactctgaggatctcatggagaaggccggttctccaagaaagggtgactggtagtcagcaccaatggagggcgcaaagaacctatgtgccggcccatcaactgagcacagtgcacttgggcagaggtggctgggctgaggggccagagccaggttgtgagaacggttcgtcctaccaaggaacagaaaccagacctttgggtccctgggccactggcaaagagtttgtaaggaggaaggtggtgtttcctgactgacattgacaggcctccctctgcggcaggatggagggctagatgagggctgctgcctcctctgcgcaggagacgtaccagagggaacctgcaagaaccaggataggcacaagcaacctccagttgaaaagcgccgggcacacgcctttaatcccagcacttgggaggcagaggcaggcagatttctgagttcgaggccagcctggtctacagtgtgagttccaggacagccagggatattcagagaaaccctatctcgaaaaaaacaaaacgaaaagtgacagtagaaccagcctcaacggctccatcaccaactgagaaagcaaggtgaaggaccgtgacccagaaagaacaggacaccaagccaaagtcacctagtctgggaaccaaggtcagggatccacccaggagtggcagactctgaggaactggttttaggtgagaagccacagaaggcagtgggtgagtgggtggggggtattggaggtttccagcttgggtgggacctcttccttgagcatgcacagacagcactctgagtggcaggacccttgggcagagtggtcacacacaccctgtgcacgtctcctgggctcaaggaggacacattccacctgagacttttctacaggttattcccaatgatgaccagtctgggatttgaggataaggatgctgagcctggacagttgggatggcttttatgaggtcctccagagtcccttacgcttgcccccgaaggcatcaggactgggtacacctgggcatcgcatcaccaccagagcaattgaaccagtaaggagtcagttaggacagagaaccaacaagggcaaaggtcagtcctggcagaagggcctcccctgtagcctgtagcctacctcccagagcaaaacagattcccaccatggggaatagagggctgttggcttccacttcagatgacctttggactgtctgagcccagcagggaacaatgcgaagggtctggaccgtagccacattcctgcataggtgcaggccataactctgctgctatagtgtcctctgtctgtaccagggcccttcacctgctttctcacatggtgatagagctgtcaggaattatagcggtgcctgacacattgtaaacactcaataaatacccagggttgggaatggggggggggggaattgcccgttgtcactgtgctgtccctcagttgctgagcagacaccagataaggcacgccccaggcagggacaggtgaacaatctaattagtcattggctggttttccttttgccagaattcctggtctacagaacccatgcctagaactctgaaggtaaaagaaagatcaggccagctgtctttcctccttggccacaccttagcatagctgtgagccttccttccctgctgtgactactgccacccctgctcccatcagactaactctagaaaaatccttctgcctggggcaggggttagggattagagtaaatgacctctgagtgtctccggcccagtgcagcagtaaagtcctcttcttttactcagccactcagcctgggccccacaggggactacagccatatggttcacctagcagactggatgagggtcctggggctgactctttgtttggggcctccacaccattgaggcaggggcggggccgtgtcctgacaacagccgtacctttcactggccctcttagagcagctgtgagggacagagacaagagacagatgaccaaggtctgctccgtcctcagtatttgtaaaacatggcagaaaggcccatccatgaaccactgtggcccttgtcagttctctgttctgtttgaaaacggaaaactaggggagggtaggagaaaagaggaggaagaggaagggaggaagaaaacggaggggggaaggggaggggtcccacatctcttagaaggcttttcctcttgcttttctgcttcagcgggcgcattcacttgcaggctgtacagccgtcctgcctcagctgctccttggcccttaaatactgctacccccaaaccaggaatggcaagccctagccctggccctgacctccaggtctccctccttcatcctggaagggaggtgtgtgtgactgtggtctgatcacatgttccctggtaacatggaagactcggaaaagctgacggtcatgggttcgcggtgccaagggatgccagcttggcagtcctgagtatacagactctctgtgtcagttaagaaagaacggagctcagtgctcctgcttcaggtttctgagtgaaaactcccacaggaaacattcgaggaggctcaccctccagccactggaggagagggggcagcttttagttgtgtccttttcccagggcagagatgggaaatagaaaaagaatacaacataatttgagttaagatgctgtttggggactgggacagctatctttttgggcagagccccattctatggaccttgcctctcaagcagagttgctggggcctgaacaaggggaacagccagtgtttcaggccagggttcaaggagttcgggttctcctctgggcctcgctcctgagagtagagatgttaggcaccatcagtgagtcatgagacagtgctcctctgtctccccatacagcccagggaccctaccaggagcatttgacaccccctccctctggctacacagctgccctgtagtagctgcattgccaaggagatctccgaagcaaagaaggtttgagaaactcactaaacagccagaaagtgaagggtagccttctttgtagataagactcatgtatatgggaaggatggaggagtgtgtgtgtgtgtgtgtgtgtgtgtgtgtatgtcttcagtaggggcaaaacacaagacccatggctatgactgagacacagtggccatactcagaaatggaagcaaaaagaaacccttggacttttgtgtacagtgggagtgaacttggcaccacccccaccttggaggtgtggccactggaggactctgttgtggcacagttgtgacatggagttggttgatagtggccaagactgttccaggcttaccttccaacaagaaatgcttaaggcccggggtccctgggcagatgcagcagtgtcatgtttaccctggcactacctgacacctgtcggatgtgtgcagcttctttgaacacagtccttctagaccacagtatccttccatagcaggaagggctggaccagagaagcctttagtcattatctttggctttggggatatgacggctgacttatagtttcctacaaatatggtgaacaatggtagacctaggtgcaaattcctgatccgtagtatactacagatgtggtacactaccatgtggccttggctaagtttcgtattctttccaagcctcagtttccttaataataagggggtggggctttaatgagaacactctatggactaactataggaattaaattatataatgtatgtaaagggtctagcacaacaccggcaccctctgtaagccctcagagattcaactggaagccggttgaggtaactgtgataagaatttgcattttagtttgtcatcacatacacaatcaagtataaatgagggacgtaccacatccttaaaacagaaacttatgatatttagatgttagttccttttatctgtacgtagcccaagctggcttcctgctcagttatcctgccttagagtcccaagtggtaagattacaaatgagcatccttagtacagcccttccgcagtggtactataattaagcatctctagatccaacagtcccaacctaaggaccaacagagtttctggcaaaaattggccaaatttcttgatgggaggtaagcctgggacagtcttggccactatcaaccaactccatgtcacaactgtgccatcttctctccagtggcctgcacctccaagtggggtatcaagttcatcctcactgtgcaaaagagtccaagggtttctttacttctctgagtatggtcactgtgtctcagtcatagccatgggtcttctgttttgtccctactgaagacacacatacacacactctaaactgtatatggaaactcagaggatctgaaacaatatccaaaagtcttggggggaaaaggaagtttattaagtataactaagaacagtttggggtgtcaggaagcttacggctccgtagggaagagtagatgttttagtaaacacctctctcagttccccaggagtgtaggtcaagaatgaagacgtcagagcctgacccctgaccctgagtggcagttctgttcatcatgatcatcacctctcagtatcccaggtgcctctaatgtacaatggcataattatagtaccactgccgaagggctgtactaaggacttagccagttaatgcactggtggggtacactctttgaatagaaccccaagctcggtggtattgcttggactgaccagagctcctcatgtaagaatgagtctcatataaacgctatgatatttgagagagaccacacggttagaacactcaataatgctcagaggggttcagaggccagggagctttgaacttgggttggcaggggatgtgcacaaaaggggtgggggtggagctgagtacaatttgcatgcaaatctgcccagatgtcctggcactcaaagctgggctgagaatgggaagagaaggtcagagctcctgcccttcgacccctgtaccatggagaaagacatctggaaacgtgaacacgtactgaaaggctgttgctgagatgctaaggcatcctagatccaacctccttgcctgagacccaggctcaaagttgctggtgcagtgtcactaggcttaaggttaaacacagagatggtctcctgcagacctggagtgaacaaagataacaaggattctgcaaggggttgcctgggccctgaggagacttgctggaaagacacattccaggggtcgtttgactaaggggacaccaccagcgttagtcaccgaagggcagcctgccaggtcctccaggacgccaagcagaaccctctggctcaggcccagcttagcagttccctccccgccccctggatacacgtagctcaccaggcctggggatatttccagaaagtctaagaaagtcctgggtctggggaggctgagagagtgcctgcccagggctgagggccaggtccctcacagagaaacagacgtgcggaggggaggggatgtgaggggagggaaggcgaggggaggggcagaggacgtgaccggcagctttcattccgggagaccggggatttcagaggaatgcagccaactcggcctctcaagttcctacttcagaccccgcccggctggagcctagggcgcctgccggggccaccttagaaatcagagggatgtgtcacaggcagtgctgtggaggggaacacgtcctgcctatagttctgtgagcagactcacccccacccgacccagtccggttcctgaaagcgccttctggttctgcagagccaggggagccgcactgactcagcttccttctctcagtccccaaacctggccacctacagtctctaccagaaacatctcagcgcctagaaacacccagtgcttctaggaatatcacatctctatcatcaaggtcatgagtacacctgggggaaaaagagaaatagactgcaccgcccacccctacactatggctccgcccaccccaaactatggctccgcccaccccaaactatggcttcagtctagagggagggacactggctgaaaaggctccacgggcccaggtagctcacaaggctcctcctgcatggctggctggccatgttgtgagagtcatttgctagacagttgaggaacaagattgaggaggggaagagatccgtccggatgtcctgccacagacatgtttgtggatttacccccattttctccttccttccatccccgtttctatcaagctctggacagaccggcaggctccaaggctgaactagcagagacccagaaaaaaaagaggaggggctgttttcaggaagctggctgtctttcatcatttctctgccccgacccctaccccaactggttgaacgctactcctctgcccacttagttctgctcgccctggggttcctcctcttagtgacagtgaatagtttacaggaatgtacctgtggcttgcccagagagcccgaggccccgagttttaatatgtgttctccctcccagagccagcccagcttagcctgcctgcacccctctattttctgattcctaagattccgtacaaatagcccttcctgttcacccaggctcctgatgtctgtctgctccctcactgggcatgtagctctttgctgcctgttgtttctggcctcctttcaagggtccgttcctatctctctaactacatttcacgcaacttgactcttggggcggtctatgaacacctacaaacagcctactgtgtgccaagcctggactacaggaggggagcccgtagtaggcagaatagaccaaacaacatgtcgtgaacgaagcaaggaacacagaggccagggatcagtaaccaagcaggttacttctttcttattctgcagttaagtgtgcagggaattcgtaactcttgagagacccaacccagagtgcaaaatcccagaggcaggatatgcctgccccgtggagcaaggccagcagccagcactggaaggacttaggtcatcagggtgagggatctgcaggctgccacgaggctctgtgtcagtactagaggaatggaatgtgtagagattgtgatcgagactgtgtctgactcagggtcaaccctagctgcttgggttgaagtggtctgagttgggtgtgggggggaaccagcttgcaggcttcaggagagggctccaaggaaagggtggcaggggagctcaaaggaggggctcaagggtcaggtgcaaatatctaagacattctggtgttcggaggtgtaatctggcagggatagacccaggagacatcaggtggcctttaaagccaaatgactagctgtggtccccagggacagtgaccagtgagaagagcactcatgtcacacaggagctgcctctggaccctgaagttaggaatgagtgggtgacaggcctgtcgcttgcaccctgcatggcagagatgagaggcagggggctctagcagctcgtcctagaaccctcttccacgctggcccagcagagggcacatgggggccagttcacaccacttccgaactgaggcttctccaacggagggagaaacaggggcaaggccacagtccctgttaccccaaacctcttgacgtttcataggaaaacggtgtcgttttatctgtccatccctctgcgaggcttaaatttcatcttccagaaaagtgacccggagcccggagcacaggacaggcacctctgctatctttgccccctgtggctttatataactcaggccttttcgcacagccattcacaaccctggcttctgtcctgctgtgccaataagattaagtattcagctcccactatattttctcctctgtactggtgacaagatgtcccctgcctccacgacagtgtctcgggtaaacagaacacagttggccctctgcatccttgaattctacctttgcagttcaaccaactgcaagcagaaagaaactttttttttttttttaggattctagaacgttccaaaacacaaaacttaaaatttccacatactgagtgccatgttgtagcaaagtgatctgtaggcatttaggtttgacattactagttatctagagatggtttaaagtatacacaggaggatgtaaccgttagtcatgaacacagtgccgttttatataaaggatttggatatcttaaggtttggacaactataggaatactgaaaaataaaggtgcccaggtaggagataatatgttgggtggtcatgggctccagtggactttttaataaatagccaagttgaagtttaccttcattgactctccccaccccccaaacacacacacacacacaaatggcttccagatacttctttgaggtcactgcacaaatacaaaaggaagatggagttgctcaaaaatggcccaaattcctggtttaattccacctattcaccgttccgtgtgtttctagagagatggttaagcatatggaagatgtctgacgtactgtactacttagttcagcttacagacaggatcccgagaggaactcccagccgcccaagagcacttagtaccggcagtgagagatcaacacttgagtacaattggggtcccttctactcctggtaccgtcttccctgctctgcaacagattttgtgccatatcactgcctctctagaagagaggggaaacccagactcctttgggatcctttggacctaccgattaatggcccaaagaatgtcttccaggccccaagaggataccgtggggtcttgctacctcatttatcccatttccactcccttagcagatctgttccctctaagctaggtacagagctgagacagggtgagtcctgagtgaggctgagtcaccccagacaaggacagtgtaggtctagcacagtcaagatggaaggacaaaagctgagctaagagacacaaatgaaaagttaggaccctcgcccaagcctgcatctgacaagccaggcctccggtggcctccccagggtagaggagggactgtgaggccaggagaagatgtgctttgacaggcggctctggataagcaggctgatgggcctctctgtagtcaacctcttgacatggtgcatatagggacgttagggatgcggagggaagtttagggatgctcgtcccagaatagatttaaaactagggcagcctcacagagcacctaagctgattgaaagcaggtaggattgaaacagatgctttctggagatgcctgtcagacccaagtatgtcaaaacgctgtaggttttccccgattgttcagcagacctcggggcacagcttaggacgttcattccccctgggctccttgtacatactgcattagaaccagcatctgacagaggagcaccagacagacccaccagtgtccacagaaggagagacccaaggcaggtggggcagggtgtagatgagtggacagatgatgcttgtagcactacctgtcctccagatgagctggctctggttctgggagggcattggtaaccacgtggaaatcctaagtggttagtcttcccttcactccctgtatcagtggatgttactgtcactttaagagtgagccatggtctggaagcccattctggcccactattttggtcccccgtggcaaagttagtttttgcagaagagaccatgacatgcttcttcatgggaagttcaccgggacacatgannnnnnnnnnnnnnnnnnnnnnnnnnnnnnnnnnnnnnnnnnnnnnnnnnnnnnnnnnnnnnnnnnnnnnnnnnnnnnnnnnnnnnnnnnnnnnnnnnnnnnnnnnnnnnnnnnnnnnnnnnnnnnnnnnnnnnnnnnnnnnnnnnnnnnnnnnnnnnnnnnnnnnnnnnnnnnnnatccacaccccccccccaacatgagctcgagccccatcttggaaaggccaagccatctagtgtccgtagccctccatcaggtatcatggtacctatggtataagtcattggtactgtagattgtcaggaaaacaaccatgacagactagtgtcaaaaaaggcaaaatatttcatatctaaaatatgattttagatcaacaggagtctgtggaagaggaagttggctgagaccattacagcagaaagctaatctgcatgaacagaaggcagaggccacctgactatctgatggcacctaatatctatgcccagacactccaatgtgtgtacctcatagccacccaagccatccctggggaaaactcagagcagacgccaattcacactctcagtttctggaataggcgatagtactccctgaaagccccaaggttgtggatatataaggggtcttgggagctagtggttttatcttagtgagaagtgtggcttagggtcctgcatgacagtttgcatcagatgtgctcagcctgaggaaagttactgtgtccttatcaaagtgtccccagagccaccactatttcctataatggtttaccctaggggagtcaaaaacctctggattcttgcctgcagagcctcctgtctatagagtcctgcttctctcacaaaaaggcaagtttcaaatcggctgagatgggccagcatgacttgttgtggatatgtgtcctgtagtttgactggtaacttcatggagagacagcctttctagcagaggagggctgacagcatggcctcgggtgctatggcattcccaggtgagagatgcccaagagggtctccattgaagcatcaccccttggagtgaggcctgcccttgtggatctgaagctgccctctctccctctaggataggaattggatgcttagagttcatgtgagaagtggtggggtacatcttatgaactgctgggcagagggacctcagcaaggccaggtgacctgccagagcttacctagctctctgcactgtccttgggtacttactaaggacgtcagccctgtgttgggcagggccaacttcacgtggaaggagtaagcagacctctgcccacggttacagcatggcatgacgtggaggaacagcacttcctctgtgggcagcggagccagcacccctaggggcatgctgggccaggaggtgccagacactacccatccctccagcttcctgtccccttcttctgcaggcctaggagggagttgcggttatttttatctgaggacactggagtgggaggtatttgtcagcatcatctggtaaaggcaattgaattgtctgtggtgctaagcatgcgaggctgttcacatttaaaaatacagttggacccgtgacagctgatgtgttcatagtgctgacatcacaacctaaacccagacggtcggatcctgagcccagcctttcagaaagccatggttctgtgtctgccatctatggaagaggaaaaaatggtcacagtctctaggttgccggtagggcaggtaatctccaccctatcctggggtgttggatctgacagtgcagtcactggacatgccagtacatgctacatgcagcccccatgtctctaaggacagtttcagcgtgtcgctgcggaggaccttacattaaagtttccttattgggtgtgatacctaacattttcccagtgtttctgagtcttaccgtgttccaagaggcggcctcaccagggctgtgggagtgtgtgtccttgactgttttctgttgctataacaaaaatgaagcaaactcatttatggacatctttcttcagctcacggttctgaagccggaaggcgaagaggagggaatggcctttactgaggggcttcgtgctaccttgttagatgacagaagacttcagggcaagtgagctcatgaggaaagaaagtgtgaggtagactccctgtaacaggcagttctcacatggcctcaccgcctgtcttattctattgccgtgcagagacaccatgacagtggcaactcttataaaggaaagcatttagttagggctggcttaccatttctgaggttcagaccattatcatcatggcgggaagcctggtggcatgcaggcagccatggagctgtggaagtagcagagagtgctacatctggatcggcaagcagcaggaagagacagagactcactggccaagcttgaatgtctaagaccttaaatcctaccccctgtgacacacttcctcctacaagatcacatctagggctggtgagatggctcagtgggtaagagcaccctactgttctcccgaaggtcccggagttcaaatcccagcaaccacatggtggctcacaaccatctgtaacaagatctgactccctcttctggacagctacagtgtacttacatataataaataaataaatctttaaaaaaaaannnnnnnnnnnnnnnnnnnnnnnnnnnnnnnnnnnnnnnnnnnnnnnnnnnnnnnnnnnnnnnnnnnnnnnnnnnnnnnnnnnnnnnnnnnnnnnnnnnnnnnnnnnnnnnnnnnnnnnnnnnnnnnnnnnnnnnnnnnnnnnnnnnnnnnnnnnnnnnnnnnnnnnnnnnnnnnnnnnnnnnnnnnnnnnnnnnnnnnnnnnnnnnnnnnnnnnnnnnnnnnnnnnnnnnnnnnnnnnnnnnnnnnnnnnnnnnnnnnnnnnnnnnnnnnnnnnnnnnnnnnnnnnnnnnnnnnnnnnnnnnnnnnnnnnnnnnnnnnnnnnnnnnnnnnnnnnnnnnnnnnnnnnnnnnnnnnnnnnnnnnnnnnnnnnnnnnnnnnnnnnnnnnnnnnnnnnnnnnnnnnnnnnnnnnnnnnnnnnnnnnnnnnnnnnnnnnnnnnnnnnnnnnnnnnnnnnnnnnnnnnnnnnnnnnnnnnnnnnnnnnnnnnnnnnnnnnnnnnnnnnnnnnnnnnnnnnnnnnnnnnnnnnnnnnnnnnnnnnnnnnnnnnnnnnnnnnnnnnnnnnnnnnnnnnnnnnnnnnnnnnnnnnnnnnnnnnnnnnnnnnnnnnnnnnnnnnnnnnnnnnnnnnnnnnnnnnnnnnnnnnnnnnnnnnnnnnnnnnnnnnnnnnnnnnnnnnnnnnnnnnnnnnnnnnnnnnnnnnnnnnnnnnnnnnnnnnnnnnnnnnnnnnnnnnnnnnnnnnnnnnnnnnnnnnnnnnnnnnnnnnnnnnnnnnnnnnnnnnnnnnnnnnnnnnnnnnnnnnnnnnnnnnnnnnnnnnnnnnnnnnnnnnnnnnnnnnnnnnnnnnnnnnnnnnnnnnnnnnnnnnnnnnnnnnnnnnnnnnnnnnnnnnnnnnnnnnnnnnnnnnnnnnnnnnnnnnnnnnnnnnnnnnnnnnnnnnnnnnnnnnnnnnnnnnnnnnnnnnnnnnnnnnnnnnnnnnnnnnnnnnnnnnnnnnnnnnnnnnnnnnnnnnnnnnnnnnnnnnnnnnnnnnnnnnnnnnnnnnnnnnnnnnnnnnnnnnnnnnnnnnnnnnnnnnnnnnnnnnnnnnnnnnnnnnnnnnnnnnnnnnnnnnnnnnnnnnnnnnnnnnnnnnnnnnnnnnnnnnnnnnnnnnnnnnnnnnnnnnnnnnnnnnnnnnnnnnnnnnnnnnnnnnnnnnnnnnnnnnnnnnnnnnnnnnnnnnnnnnnnnnnnnnnnnnnnnnnnnnnnnnnnnnnnnnnnnnnnnnnnnnnnnnnnnnnnnnnnnnnnnnnnnnnnnnnnnnnnnnnnnnnnnnnnnnnnnnnnnnnnnnnnnnnnnnnnnnnnnnnnnnnnnnnnnnnnnnnnnnnnnnnnnnnnnnnnnnnnnnnnnnnnnnnnnnnnnnnnnnnnnnnnnnnnnnnnnnnnnnnnnnnnnnnnnnnnnnnnnnnnnnnnnnnnnnnnnnnnnnnnnnnnnnnnnnnnnnnnnnnnnnnnnnnnnnnnnnnnnnnnnnnnnnnnnnnnnnnnnnnnnnnnnnnnnnnnnnnnnnnnnnnnnnnnnnnnnnnnnnnnnnnnnnnnnnnnnnnnnnnnnnnnnnnnnnnnnnnnnnnnnnnnnnnnnnnnnnnnnnnnnnnnnnnnnnnnnnnnnnnnnnnnnnnnnnnnnnnnnnnnnnnnnnnnnnnnnnnnnnnnnnnnnnnnnnnnnnnnnnnnnnnnnnnnnnnnnnnnnnnnnnnnnnnnnnnnnnnnnnnnnnnnnnnnnnnnnnnnnnnnnnnnnnnnnnnnnnnnnnnnnnnnnnnnnnnnnnnnnnnnnnnnnnnnnnnnnnnnnnnnnnnnnnnnnnnnnnnnnnnnnnnnnnnnnnnnnnnnnnnnnnnnnnnnnnnnnnnnnnnnnnnnnnnnnnnnnnnnnnnnnnnnnnnnnnnnnnnnnnnnnnnnnnnnnnnnnnnnnnnnnnnnnnnnnnnnnnnnnnnnnnnnnnnnnnnnnnnnnnnnnnnnnnnnnnnnnnnnnnnnnnnnnnnnnnnnnnnnnnnnnnnnnnnnnnnnnnnnnnnnnnnnnnnnnnnnnnnnnnnnnnnnnnnnnnnnnnnnnnnnnnnnnnnnnnnnnnnnnnnnnnnnnnnnnnnnnnnnnnnnnnnnnnnnnnnnnnnnnnnnnnnnnnnnnnnnnnnnnnnnnnnnnnnnnnnnnnnnnnnnnnnnnnnnnnnnnnnnnnnnnnnnnnnnnnnnnnnnnnnnnnnnnnnnnnnnnnnnnnnnnnnnnnnnnnnnnnnnnnnnnnnnnnnnnnnnnnnnnnnnnnnnnnnnnnnnnnnnnnnnnnnnnnnnnnnnnnnnnnnnnnnnnnnnnnnnnnnnnnnnnnnnnnnnnnnnnnnnnnnnnnnnnnnnnnnnnnnnnnnnnnnnnnnnnnnnnnnnnnnnnnnnnnnnnnnnnnnnnnnnnnnnnnnnnnnnnnnnnnnnnnnnnnnnnnnnnnnnnnnnnnnnnnnnnnnnnnnnnnnnnnnnnnnnnnnnnnnnnnnnnnnnnnnnnnnnnnnnnnnnnnnnnnnnnnnnnnnnnnnnnnnnnnnnnnnnnnnnnnnnnnnnnnnnnnnnnnnnnnnnnnnnnnnnnnnnnnnnnnnnnnnnnnnnnnnnnnnnnnnnnnnnnnnnnnnnnnnnnnnnnnnnnnnnnnnnnnnnnnnnnnnnnnnnnnnnnnnnnnnnnnnnnnnnnnnnnnnnnnnnnnnnnnnnnnnnnnnnnnnnnnnnnnnnnnnnnnnnnnnnnnnnnnnnnnnnnnnnnnnnnnnnnnnnnnnnnnnnnnnnnnnnnnnnnnnnnnnnnnnnnnnnnnnnnnnnnnnnnnnnnnnnnnnnnnnnnnnnnnnnnnnnnnnnnnnnnnnnnnnnnnnnnnnnnnnnnnnnnnnnnnnnnnnnnnnnnnnnnnnnnnnnnnnnnnnnnnnnnnnnnnnnnnnnnnnnnnnnnnnnnnnnnnnnnnnnnnnnnnnnnnnnnnnnnnnnnnnnnnnnnnnnnnnnnnnnnnnnnnnnnnnnnnnnnnnnnnnnnnnnnnnnnnnnnnnnnnnnnnnnnnnnnnnnnnnnnnnnnnnnnnnnnnnnnnnnnnnnnnnnnnnnnnnnnnnnnnnnnnnnnnnnnnnnnnnnnnnnnnnnnnnnnnnnnnnnnnnnnnnnnnnnnnnnnnnnnnnnnnnnnnnnnnnnnnnnnnnnnnnnnnnnnnnnnnnnnnnnnnnnnnnnnnnnnnnnnnnnnnnnnnnnnnnnnnnnnnnnnnnnnnnnnnnnnnnnnnnnnnnnnnnnnnnnnnnnnnnnnnnnnnnnnnnnnnnnnnnnnnnnnnnnnnnnnnnnnnnnnnnnnnnnnnnnnnnnnnnnnnnnnnnnnnnnnnnnnnnnnnnnnnnnnnnnnnnnnnnnnnnnnnnnnnnnnnnnnnnnnnnnnnnnnnnnnnnnnnnnnnnnnnnnnnnnnnnnnnnnnnnnnnnnnnnnnnnnnnnnnnnnnnnnnnnnnnnnnnnnnnnnnnnnnnnnnnnnnnnnnnnnnnnnnnnnnnnnnnnnnnnnnnnnnnnnnnnnnnnnnnnnnnnnnnnnnnnnnnnnnnnnnnnnnnnnnnnnnnnnnnnnnnnnnnnnnnnnnnnnnnnnnnnnnnnnnnnnnnnnnnnnnnnnnnnnnnnnnnnnnnnnnnnnnnnnnnnnnnnnnnnnnnnnnnnnnnnnnnnnnnnnnnnnnnnnnnnnnnnnnnnnnnnnnnnnnnnnnnnnnnnnnnnnnnnnnnnnnnnnnnnnnnnnnnnnnnnnnnnnnnnnnnnnnnnnnnnnnnnnnnnnnnnnnnnnnnnnnnnnnnnnnnnnnnnnnnnnnnnnnnnnnnnnnnnnnnnnnnnnnnnnnnnnnnnnnnnnnnnnnnnnnnnnnnnnnnnnnnnnnnnnnnnnnnnnnnnnnnnnnnnnnnnnnnnnnnnnnnnnnnnnnnnnnnnnnnnnnnnnnnnnnnnnnnnnnnnnnnnnnnnnnnnnnnnnnnnnnnnnnnnnnnnnnnnnnnnnnnnnnnnnnnnnnnnnnnnnnnnnnnnnnnnnnnnnnnnnnnnnnnnnnnnnnnnnnnnnnnnnnnnnnnnnnnnnnnnnnnnnnnnnnnnnnnnnnnnnnnnnnnnnnnnnnnnnnnnnnnnnnnnnnnnnnnnnnnnnnnnnnnnnnnnnnnnnnnnnnnnnnnnnnnnnnnnnnnnnnnnnnnnnnnnnnnnnnnnnnnnnnnnnnnnnnnnnnnnnnnnnnnnnnnnnnnnnnnnnnnnnnnnnnnnnnnnnnnnnnnnnnnnnnnnnnnnnnnnnnnnnnnnnnnnnnnnnnnnnnnnnnnnnnnnnnnnnnnnnnnnnnnnnnnnnnnnnnnnnnnnnnnnnnnnnnnnnnnnnnnnnnnnnnnnnnnnnnnnnnnnnnnnnnnnnnnnnnnnnnnnnnnnnnnnnnnnnnnnnnnnnnnnnnnnnnnnnnnnnnnnnnnnnnnnnnnnnnnnnnnnnnnnnnnnnnnnnnnnnnnnnnnnnnnnnnnnnnnnnnnnnnnnnnnnnnnnnnnnnnnnnnnnnnnnnnnnnnnnnnnnnnnnnnnnnnnnnnnnnnnnnnnnnnnnnnnnnnnnnnnnnnnnnnnnnnnnnnnnnnnnnnnnnnnnnnnnnnnnnnnnnnnnnnnnnnnnnnnnnnnnnnnnnnnnnnnnnnnnnnnnnnnnnnnnnnnnnnnnnnnnnnnnnnnnnnnnnnnnnnnnnnnnnnnnnnnnnnnnnnnnnnnnnnnnnnnnnnnnnnnnnnnnnnnnnnnnnnnnnnnnnnnnnnnnnnnnnnnnnnnnnnnnnnnnnnnnnnnnnnnnnnnnnnnnnnnnnnnnnnnnnnnnnnnnnnnnnnnnnnnnnnnnnnnnnnnnnnnnnnnnnnnnnnnnnnnnnnnnnnnnnnnnnnnnnnnnnnnnnnnnnnnnnnnnnnnnnnnnnnnnnnnnnnnnnnnnnnnnnnnnnnnnnnnnnnnnnnnnnnnnnnnnnnnnnnnnnnnnnnnnnnnnnnnnnnnnnnnnnnnnnnnnnnnnnnnnnnnnnnnnnnnnnnnnnnnnnnnnnnnnnnnnnnnnnnnnnnnnnnnnnnnnnnnnnnnnnnnnnnnnnnnnnnnnnnnnnnnnnnnnnnnnnnnnnnnnnnnnnnnnnnnnnnnnnnnnnnnnnnnnnnnnnnnnnnnnnnnnnnnnnnnnnnnnnnnnnnnnnnnnnnnnnnnnnnnnnnnnnnnnnnnnnnnnnnnnnnnnnnnnnnnnnnnnnnnnnnnnnnnnnnnnnnnnnnnnnnnnnnnnnnnnnnnnnnnnnnnnnnnnnnnnnnnnnnnnnnnnnnnnnnnnnnnnnnnnnnnnnnnnnnnnnnnnnnnnnnnnnnnnnnnnnnnnnnnnnnnnnnnnnnnnnnnnnnnnnnnnnnnnnnnnnnnnnnnnnnnnnnnnnnnnnnnnnnnnnnnnnnnnnnnnnnnnnnnnnnnnnnnnnnnnnnnnnnnnnnnnnnnnnnnnnnnnnnnnnnnnnnnnnnnnnnnnnnnnnnnnnnnnnnnnnnnnncacacacacgctcacacacacacgcacacacacgcacacatacacactgcaacacacttgctccacacacacgaccacacacacacacacacacacacacacacacacacgcttgtgcacacacacgcacactggccatatccccatccctcagtgaatttggcaagaaggctgactctcacctatttgtcctggtccctggtaaacacctgactctaggctgttggccactctcctagcaaaatgagagtccaacagggaggaaccctgattcaagaaacagcaacccagacctttcttcaagggaacctggaaagaagaacaggataggggtagcctgccaccatgttcatgagaaggcctgttttaaagtttacctcaaggagtagaaagcagagccaggcttctgttcctcctgccaacctcagacagtggtcagacccaggtatctgaccattcccaccccagtgagatgccaagtggtagagccaggtaaacatggagagggcaccataagaatgcacacagtaggacagtcatagccactttggactgacagtgagacaggtgccccctgctctgtgggcctctatgccctgggctggttacctgtagctatgtcttccctgtagcggaggcaggtgccactgtatctgagtatatatcatcatcatattcagacagctcagctctctcctctggttccgctgaaaggaaaacttccagccctgtggagggcttctcaaggccatagccacagcaggtgctggctccccttgcctgagaatgaggcttcacgcctgcgtaagtgtgagacagaattcccactgaatcagcccggcttctcggcttctcccgcaccccagcaccactcccccgccctgctgccatcagcagggcccagcctacctgacctgatttcaccaactgaaatagtctgggtgctcacagcccgggacagttggaaatgtctctagaatgatctagcatcatctggaaggggctgatggcatttcccagccacggtgtggggtgtgggtccttaccctggaggcaagccctaggaagaaagcattcacaaccttagtaccaagagccagcggtctcagagaacgtctccagtcgttaaaggggcatctgggggcatattttgtgtgtgtgtgtgttgattagaacagactcaagagcattcttatggaattcttttttgtttgttaggtgacatcgaaccacagttacaacagcacatagaagtcttgatacgttgaccaccaggagagtttgaggcatatgtgacagccacctgatggtgtctgtgtttgcagtggctttactgtctctgtcctttatccaggggtctacagctaccctgtagacctacacagaaaggctgtgagacctagggctggccaatcaatgccttcataagtgcatgatcggtctgaaggagggccatgtgtaaagcagagccagtcacaaccccactccgacttttggggattggctagtaggagagaggggctccctgtcttcttctaggcccacatcattataaaagacagtagggcctgctagaagccacctttgctgtgttggtcagaggcccttgttatggtagagagtatacagtaggcgtatacactaggcagaagctagagagtatacagtaggcgtatacactaggcagaagctagagagtatacagtaggcgtatacactaggcagaagcttctttggcagagcagttctgacatcgtgtctttgccctgtgtttcccgtgactacgtctctggaccctgctcaaggaagcccactgaagccctgtgtgcccgttttcatttgcaaagattctgtcactgacaagtgaaacccataagtgtcatggttcagagcagagtgaagcattgaagtcaccaggagctgttattgggtgatgggtgtgggtcaaatgtaatggggaaagagccaggttttatgataagaaatgatatacagaaacccagccagtggctcagggctaacagatataagaaatccaaggcaagcaaccagtctttggcagaggccacaatcctttgttcacaccagtcttctgggataccttctcctacagacacaataatgaacaaagtaggtaactgccagagtccgagctctattctgtaacatcctggccagatgtggtatccatgtccccaaagactaaaccaacgccaccatccagatctaggaggtggccaaggtgaccagcttagagtccagcagttgcgtcccttgactggaaccttccagaaagaggaaatgtcaaagtctagggaaggctttggtagacaggatggctcgggagacttctcccagaaagccctgccacttattaaatgccttctgggtgccagatacatgacacatggcactcttgataccaaagagaacaggctgacttgatcagactaatgctaagccctggggagccctactccatgcttccttgagtagatatgagaaagcagaggtctgtctgagatccaagctaggtccccttttcccctcctgacaccatagcctagggaaggcagccagtgccacccaactctctgttccaactctgctccctcatactgagtaatagtgattcttctctgaggacaggagcctattatgtcaaaggggtctattgttacatgaatcagttctttttgtcaccagtcacagaaaccaacttcaagtagcttaacatccccaagtcttgaggattctaaagcattaagtcccaagagaaatgggaactagaacagtgggctcttctggggccagaaatgacctgatttgtgctagcatccctggtctctgagaagacctaagcttggagatcccctcccctctttactgttgatgcctctggcataaggaaagacttccatggggcttttgagcaggagcctccttccctgggcttccccaatgataatgacttggttgggacaacagctttctcctgggtgcaggtggcagggcctgggctgagatgtagagccagagcaatgaggagacacttgagtttctgtgggcaagtgaggaatacagacttgacaagcagtccaaaggagaaattccaggtgggaggaagtgaccagaatcacaggtgactacagacacacacgtacacgtatacacacacacacgtacacacacatacacacacatgcacacacacacatatgcacacacacatacatacattcacatacacacacgtacacacacacgtatacacacatgcacacacatgcacacacacacacacacacccatatgcacacacacacatacatacattcacatacacacacgtacacacacatgtacacacacacacgtacacacacgtacacacacatgcacacacatatacacatgtacacacgcacatacacacacatgcatgcatgcatgcacacacactcacgcacatacacacacgtacacacacatacacacatatacatacatgtacacacacgtacacacatacatacacacacgtacacatatgcacgcacacacatacgcacactcacacacatacacacacagcatagcacagtggtgtgaccttccatgcagcaacatagagaaaggaaacagtctaagactgggcagaggaacagcaaatgtcgacagtatagcccaccaaagtgaaatgtaccgtgagtcatacctagcacacgctggcatggagagatgtaggtaagaagtgagagagggaaactagcagacacacaaagcaaaggaaaggtgagctgggcaaacatcctcctttctactctcaaatcttgggtgaaaggatgagcatcagcctgggcgtctcaccgaagagatgcccagtcacttgtcatagagcagttatctgtccagttagcactcaacaactgagcacctcccataaaccaggtacaacccccgaggcatggcgtggacccctgtcctgtgagttcctggctaagggtcagtagatccttagcctgtgtcagatgacaagagaagtagggatgagtagggtgcggtgggggttaacgggggttgcttttgtaagcagacagtcagagggacccgactcaggagagttgggaggagaaccctggaggaagaaaaagtcggagtcagaaaaaaaaagaaaagaaaaagaaagaaaaaagaaaggagtgaattctagttgagcatttctttcctctttccaatataaaaaactgtatccaataactcattttagctcccaccagttacatggaagaatgtcagagccgctgatactggacagccatgagttgcccacatcccccatcccggacacacacactccccattacctacctctcccacatccatcccaactttacaaggggaaaaaaaaacttcctgccagcagttactaacagagtactttatccccagccctcccggaggtannnnnnnnnnnnnnnnnnnnataagaattgctgtctcttaatcttcaccaacactgatggttaaaatttttactctatagcagacagatgaaaaatgtagtttcattcattcaactactaccggtattaagtttgtgttctttggagattttcctgaggcaggatctccctacgtagctcaagctgacctaaaacttgcaacgaatcctctctgcctccgtctcagacttacagatctgaaccactgtgcacagccatttctacatacttattggcaatttttttgttttgaccagtagcccacctcttaatgtcctctatatttgtctatggtaggcttggtgctgttgttacaaatttgaacaactttatatatcactggttctcaaccttcctaatgccaggatccttcaatacggttcctcacagtgtggtggcaccaccaccaccataaaattattttattgtgacttcatagctgtgcaatcttgctactgttatgaattgttatataagtatctgatatgcaggatgtctgatatgtgacccctgtgaaagggtcgtttgaccccaaggttgagaactgctgctatatattaagcaattaccctccgtcctatttcctgatggcccgatatctccctcatcagtagctgtttcgtgcggcctctgctgcttccctgtaaagcccacctctctccacccagaagtgtgatttcactccacttcactctcttcaggtttttatttttctcagttggctttttactcctcctagagttcaccggagggtgcgggatgaagggcaactgtagattctttcctccctgatatcggacagctgtggtcctgatgctgtatctcctctacctctgatttgtggccctctggggatcatatgataaacccttgtggatgccaaatttgcttctggggtgtctgatctagctctccatgcttggtcagtcccatggccttttaattattaaggctttggaataaattaaaagtaatacagcccttttccaatttttgttgtgtcttgactaggggacttttccttattattctttcaaattannnnnnnnnnnnnnnnnnnntcatacctagcacacgctggcatggagagatgtaggtaagaagtgagagagggaaactagcagacacacaaagcaaaggaaaggtgagctgggcaaacatcctcctttctactctcaaatcttgggtgaaaggatgagcatcagcctgggcgtctcaccgaagagatgcccagtcacttgtcatagagcagttatctgtccagttagcactcaacaactgagcacctcccataaaccaggtacaacccccgaggcatggcgtggacccctgtcctgtgagttcctggctaagggtcagtagatccttagcccgtgtcagatgacaagagaagtagggatgagcagggtgcggtgggggttaacgggggttgcttttgtaagcagacagtcagagggacccgactcaggagagttgggaggagaaccctggaagaagaaaaagtcggagtcagaaaaaaaaagaaaagaaaaagaaagaaaaaagaaaggagtgaattctagttgagcatttctttcctctttccaatataaaaaactgtatccaataactcattttagctcccaccagttacatggaagaatgtcagagccgctgatgctggacagccccgagttgcccacatcccccatcccggacacacacactccccattacctacctctcccacatccatcccaactttacaaggggaaaaaaaaacttcctgccagcagttactaacagagtactttatccccagccctcccggaggtagggggtgtggccgcgaggctgcagtatacctcggaacagaagcactttagccactggggaagtccagtttggatgggcagctctcccttggtcaattgttttttaaaaagtgagaccagtgtgcagggtgcagggttgtctgtcagcctcaggaagtgcaaaaatatactgtggtccttacgccagccacccccacccccacccctgtccccgctacagcatcatcgtcctgctgtggctggcctgcccacaggggtcgagtgggtaggggaactgtgttttccccccactctgcctgtacacagctgtttttggcttggccacagaattctaccacaccagagttcatgtggttatccagagtgggaagaatttcccagaatgccttgagaaacctgagacactgaatggctttcagggcttattgatgtggctgtgcgcaggaaatagcagtacgtcaataaatagttttaggcaggaaaccgggcttaaatggtagccttggagtttggggaaaggcaccaggggttgctgggagggagcctgcctgtcagatgagaacctagagccaaatagcagactttgaaataactgcccctgagctgagaggccccttgctgctcttggatgtaagaggctgaggttaggggcagagtcaagacccaaggacaggcctgtctcagctggcagaaaggggctctttgtgtaaagagggaagctggcaacttctaacacttgtcaggaagagacacacagcctgtaggtgaggtgtcaggaggagacacacaggcgaggctccggcctctaggtgaggcctgttcacaccccatctggtagaaatcagtgaatcagtgccagctgccaatcaccccaagacttccactgtcctacttttaaaaggagaaaggggggaggggtcaaggaaagcaaccatcacactcagtacctgtttttctggttatgaaaagaaatgattatagaaatttagaaaaagccataaatacaagaaagaataaaggccactcccagttccaccttttggaagccaccatattaaacatttttgaacagtccttttaaaagctgtatctgtggataataatatatactatctgttttcatttagtgttagacaaacattgtctcgtacttctatacatttttttataaatttctttttcctttttctttcttttttcctgtttgtttgtttgtttgtttgtttgtttgtttgtttgaaacagggtctctgtaacagtggctgtcctagaatgtactctgtagactaggctggccttgaactcacagtgctgggatcaaaggtatagaccagacaagccaaacctcgtggtcatcactgattcaaccattgtctgactggctgctcagactcttgactcttgactttttatgttaagcctgtttcaaggtatctttacattcagtttatgtgtgctcacacacatgcacgtgtcgtagcttgtatgtgaaggtcagagggcagctcgtaggaaacatcgctttccttccaccatgtggaatcgaacttagatagtcagacttggaggcaagctcctttgctccatgagccctcttgttggcccctgaagaatacttttcccgtcctcattattacttcatgatagacacccagaggtgcaattgccagacgactgttaaggttaattaaggttcctcaggaaaaatgtatactgcccatatataagaaaaatgtatactgcccatatataagaattgctcttaatcttcaccaacactgatggttaaaatttttactctatagcagacagatgaaagtgtagtttcattcatttaactactaccagtattaagtttgtgttctttggagattttcctgaggcaggatctccctatgtagctcaagctgacctaaaacttgcaacgaatcttctctgcctctgtctcagacttacagatctgaaccactgtgcacagccatttctacatacttattggcaattttttgttttgaccagtagcccacctcttaatgtcctctatatttgtctatggtaggcttggtgctgttgttacaaatttgaacatcctatatatcactggttcttaaccttcctaatgccaggatccttcaatactgttcctcactggtgtggtggcaccaccaccaccaccaccaccaccataaaattattttattgtgacttcatagctgtgcaatcttgctactgttatgaattgttatataagtatctgatatgcaggatatctgatatgtgacccctgtgaaagggtcgtttgaccccaaggttgagaactgctgctatatattaagcaattaccctccgtcctatttcctgatggcctgatatctccctcatcagtagctgttttgtgcggcctctgctgcttccctgtaaagcccacctctctccacccagaagtgtgatttcactccacttcactctcttcaggtttttatttttctcagttggctttttactcctcctagagttcaccgtagggtgcgggatgaagggcaactgtagattctttcctccctgatatcggaaagccgtggtcctgatgctgtatctcctctacctctgatttgtggccctctggggatcatatgataaacccttgtggatgccaaatttgcttctgggctgtctgatctagctctccatgcttggtcagtcccatggccttttaattattaaggctttggaataaattaaaagtaatacagccctttccaatttttgttgtgtcttgactagggacttttccttattattctttcaagttacttttaaggtcattttttttaatcaagtctttatatccattgcccttgctccctcacacacagacagacagacagacagacagacagacacacacacacacaagctcatgttaggcttttataaattagtttttgatcattaaaacatctcactggtaaattgtgtcaggaaagcaagctgttgactttattatatattaatttaatatctagatactcatattaattagttactaaaccctgattaatctttattagaggttctcttgggtttttcatacatataatctaataattttctctctccttccacccatgggcattgccactgtttttcagtcagacccctcgatgtaatagattgcatttatagatttcctgatgctaaatcattacagccttcctgggatgaaagtgtacttgttataatgggtctactcgctggcatttcatttaggactgccccatccatccacattagagaggtcagccagtgcgcttccttgtttatgactgactgcgagatgtcgcctgtaaatgaccagctggcaagcccccctttcctgagccttttgggttcgtttccaaatgacaacaattatctcgcttttcaaataagcttggatgaatttccctattaaaaagtcataactttagagacctccctataaaggtaattctttcataatttgattttagttcatgtcttttcatccttcctggtcttgagttcttcccttttttttcagtaacgtagatgatatttatttttctgaagcattcgctgcatgcgtctttcgactttaacagagtcagatttgaccctgccttaccttcttccatattggttttcatagtaaatcttttctaatccttccttctggcttttgtatgcaattttctttttttattttctaattaatttccagttttgtctatattgtgttctttcctctatcttctttagctaatgatggttttctaattcctttggagagagttttggataacacagtctgctagaagtacaacgtagcctcctcacacacttctaaatggaattagaggttctacttcatctagtatatccaaaatttcagcacagactcaactttttaaaaatatttgttttatgcgcacatgcgtaagtgtggatacacacatgtgggtgaagatgactgtgatggcatcagattcccatggagctggggctaccggcagttgtgagccaccaaatggggctggaggtgtactcagattctctgcaagagttattaactgctgagctatctctctggccctacccaaccctttttaaatgacaggttttacattcttttttccatactgtgtcctcaaaaccattgtcacttcataagtaaacacactgttcagtgagcccctttaagcattcagcgtccacacgtgactagtagctatcacactggagaacatgggttagcacgccgagttctcttcttttgtttaatacccagcagtcagttgaatagtcagtaaacatgttgacctctcagtgtagcttgaaccacatcccacaagtgttttgttgatggtggcttggtttttggtttttgtttttgtttttgagacaggatctctttaagtagccttccctagctgtcctggaacactctatgtagactaggctggccttgaattcacagagaactgtctgcttctgacactacatcgggtgacaatgttatgtttgagaaattatagtagaatcaattctctatgtgaattgtcctaatttagatgtattaattatattactcaaatcaccaaagtaattcatcctgggccatgtactttgccagagacatcattgccttaacatcccagtgtaatgtgttccaggttctccttgcctcaatagctttcgctacattttgagtctgtcctgttatctatttattataaattgtattttatctttgtatgtaattatagctttatcttttttttaaaaacccactgattttattactaatttagttctcttcgtgtttgtccatagctaatttgacttgctcattatttaatataccctgttttcagtatgctactggttcctaatgtttatctttttaacgcacagtttttacatttatttattgttgggggcagagcacacacatgccacagtgtgcacgtggaagtcagaagatcacctgccaggctccattctgtccttccaacctgcagatctcaggggttgaacgtggttgcaaatgtctttcacccactgagtcatcttgccgatccagttttaatattcttcaaacacagttttactgtcttcaaatgctgtcttcaaaaatcagtatttctctgattagcaagctaagggaaaaacgattgacataagaatcttcagggtataagttaggaagtgaaggtcaccttttagtcttccattcgttcactgtctaacggtcttagccagtcctttgtaattggattttgaattattaactaactactactatggaattattatttatgttgaattttaaaaattagaattgagccaaccattggtggcacatgcttttaatcccagcactcaggaggcagaggcagtcagatctgtgagtccaaggccaacctgatctacagagcaagttccaggatagccagggctacacagagaaaccctatctcaataaggttaaaaaaaaaaaagccaaaatgaattttttaaataaaaattgaatatcttctcatctaaaaatttttcctggcttttgattaactctttaaaaaacaccctttaactggcttatttggacttaacgaagttaagtctgcctggtttcaatttcccctcctgttcttctatggcatgattccctctgaagtgaggtatatattttgccggctggaacattcattcaagaaagttttaatttttttttttgcttttaataagataatataaaaattgccatttcaactaccttcagtgcaccacttgacaatgtaaaatgttaaatacacattgttggacagacttcccccaaaacctcttcttcttacaaagctgagaccctgctgaccccgtgcctcctttctcagcacttggcggtttctgttctgcttcctgcaatgtcccctgactgcctgaggcccttgtctgcatctcagaatcctagccttcatcaagactgatttacagttaggaacactcctacttttgagctgccataatcagtttaccagaattggctgacggcaatgaacctcttgtgaaggtagttcagggtaaacatgctttatcatggccccttgtgtattgcctggtccatagcacaatgatattcttaaaagaagaattaataaacagatggatggatggatgcatgcatggatggatgcatgtatggatgcatggatgcatggatggatgcataggtggatgcatggatggatgaacagacaggcagatgaatggatggattaatggatggatggatgggtggatggatggatagatggatgggtggatgaatggatagatggaatggatggatgaatggatagatggaatggatggatgaatgaatgaacgaacggacggacggacagatggacggatggatggatggatggatggatggatggatggatggatggatggatgactgagtgaatgaacaggcagacagatggacagatggatgggtagacgggtggacagagagatggatagacagacagatggatagataagtgagtgagttcatgaagactttagattctcctggtgggtggacatgctggctcaacactggccatgaaagcctggtgacctgagtctgacccctccaagccaggtgtaaggggaaggcgagaactaactccacagtcatcccctgacctccacaccatggcacatacaccgcacacacatgcgcacacaccaaatattaataaattaacagtgttttctattatgtgctaggcagtagtgagcaggagttgtacttctgctttgagcctagcacaagggctaaagtgggccttagttgtagactgcagatctgtatgggccagtggcattctccttcactccctgagaggatggtgatttgagagtcagacaaaggaggtgaactgaactgaacttagagataatgaatgtgagaaaggtgccattcccaacacacacacacacacacacacacacacacacacacacacacacacactcacctcaacgaccaccatatacatccccagcccatagtcttagggacatccagcccaggctgagagacatctgtgaaggaggaagatggccaagtcagagcaactcacagaagaggagcttgtcccccaacccagggtaaccggaagtggtggttcctagcctcattttaaacccaagtccgcccttgtgctgtgctgggatcctgggacccagctggtgctgcccgggcccctcccagcccctcccagccccagtgaggttgacgttctcttgtgcctccacagaaggacttcactgtgcgggaggagctgcagcaacaggatgtggagcgctggctgggcttcatcaccttcctgtgtgaggtgttcggcaccatgcggagcagcactggcgagcccttccgagtgctggtgtgccccatctacacgtgcctccgggaggtaagagcaaagtgtgccccatctacacgtgcctccgggaggtaagagcaaagtgtgccccgtctacgcgtgcctctaggaggtaagagcaaaggctgcgcatgacctcggtactgccctgcccacctgtcggtactaaaggaagccctgcgcatataccttggagagagacacaggagagcaatggagttgggttacagatacaagaatgacttccccatgccttaagaaataagccttgactcagacttcagtaatcttaaattttagttgaagaggtttacggtgttatatcactgaatggatctttggacttggttggtttaccactgatttttttttcctttaatgttttgcttctaaaatttaactttaaaagtaataaatagggggtggtgtgatggctcagcagataagagcactcactgctctaaagattcaggtttaagttcagttccaagcacccacgtggggcagttcacaaccacgtgtaactccagtgccctcttgtggcctctctgggcactgccacgggcagtgtgcacaaactcatcgtacatataagaataaaagtttttaaaataataaaataagagaagccaagagactttggagacgggagtttggggtgcttgctccttcacacataaaagctcactctgaaaggtcatctgtggctggttgggggacagaagtagacactgggaagccgactggaagccaggtagcagggaaacatcccagctcccactaggagggatcgagccaagggtggggctctagcatccttaagagcagcagccttcaggattggctgataggggatggaagggagggagataggatggaggtcctatttcccagccacatggccacatcccctgggatgtgagactcagaaagaaaatcactgtggggatgagagccaggaattaggcctctggacatctatttgggtcacttgttgactctcctcaaaggcagtcctgagggtagttggcagaaagatctaaagtgccacgaagggccccatggggagtaaggaaactacttctgtcaggcatgtatgggcacctgaggctaaaggcaagacaagggtgatattacccagtaagagagaacaaacagggagatggtacagtcatgtgtagaggagagaggaagaggaggtaagtcgggatttgacgcctccagagagctccagaagagcaagtgaaaggcatgccagcatccttcagagggggctggtactagtcctgactccacccatcccagtcctgactccacccatccctgtcctctccttccctggcagcccttagcttccaccaggacacggggaagggatgggtgaagaaccaaaggtcctcgatggagaagtggcaagaagaggggtcctggagctctggcagagagaccagcagtgtgggcaggtacttcagaccatgttctgaaaaaaaaaagctatgagaaaaatggactgaaaggaaaggagcagcatcaagaggcatgcttagtttttaattgactataataagcagtgtgaacaaaatgagaatgcgcttgtgtttggcgagcatcccctaataggacggtggtatgctcatcccagcctaaagcagagcttacatcccctcgggtcacttttgaacccacagcactgagctgctctatgctggtggtctctgtttccttatgaatatgcttgactttagagatgcctcagtcatccagttcacagccacccctgacttgattttactcttcggggggcctcagttcagaggaccacgggcagcttggccttttgtgtcccttcggagtgagcagaaagtgcccccttctcagaggctcactcctttccacgtggccatgagccacctccacataagggacagtgacctggggctgtgacctggatttcccgattccttctgcatgatctgggcccctcctcctgctgttgtcacctgctcctccagcaggaagcaggactgttgggagtgctggccctggctgctgggagatttttcacaccacctaaggtagtgcaaactctgtggtgtgagatccggaaggtgccaagaggtctgtataggcggggagcagtgagtgaggccttcctctgtgcacacttgttgaatgagttaagttttgcaggagggacattttgacaagcacagaaccacactgctctcatggtcaacttgagtggtgagccatctatctgtctgtctatctatctatgcctttccgcattttgtacaaaaggaaatcagagagccactactagggtccagctacccgctgccttgcagtcacattcgcccaggttttggctgtaccctcttggggaagaaatagggcactctgggcttttctcaattgcaaaaaaaaaaaaaaaaaagtctcacagcactacagcactttgagtgaggaaaaaacatttaaaggaggaaaaattgtgattttagaaggttcagtccatggtcatctggctctgttgtttttgagcctgtggtgagccagaagcatcacggaggaaggggcatgaagaagtaaaactgcttaccctgtggcagccaggaagcaaaaagaataagaaagaggaaggcgccaagatggagacatacatgtgtgtgtgttttcccatgtgccttctcgacttcctcttcacatcctgtgtttgcttaacatgttcttttcagcttactctcttcggataggagatggtactgtgggtaaagcacttgcaaattcaaggactggagttcagattcctcacacccatttcaaagcagatgtggcacagctgtaacccagtgccggggaggcagagatggggttccctggagccagctggttagagctagactagccaagtccgcaagctctaggtctattgagagatcctgcctcagttaacaagatgggaagtaatcaagaaagacacccaacatcaacccctgacctccacatacatactcgcatgcatgtgcacacacatatacatacatgcacaacacacatatgtacacacacacatgcacacgtgaaaaaaattaacatcataatgctgacatttacaggagatcttccttcttaacagatccttaaatgtaaatatggtggtattttctatgtacggaacacagagcagacctccagactcatttatctacccaactgcagcatttatacccactggtgagcaaagagctcccacttcacctccctcagccttctgaaaccatctctccgttctctgactcagtcaatttgatgatcttaggcacctgatgaattagcatggtttctgttcctaccataccagatgttgaatgttttgtctttaaaaaaaaaaaaaaaaaggaagatttatttatgtatttatttagcttacagtttgggaggctacaagtccaaactccatggtaccaggtcctgaaactccatcatgccatagtgggtggcacataagaaagatcacagaacagtgacagggagccagggagtgatgcagaggtcagtggtcaggcctgctctttttatgacaactggagaactcgccacagtgttcaccccttaggggatagtctcacacacacacacacacacacacacacatacacacacaggatctgatttcttctcattatgcctccctcttctgaaaggttctatgctgactcccaacactgccacactaaagcccaagcttccaacacacaaactcttaaagaacaaactactccagaccatagcacctgataggactggagccatgcagtagtaattactctccttggctggcttgtttgactgagtgtaatatcctttaggctcatccacatagctggtattaagggatttgaccttttgaacactggataaatgttcaagtctgtatgcgcaccatgtcttctgcactcaggcactgatggccagtccaattgtttgtcaccatatggttcttgtgaccactactgcggtgaacatcggaatgggtgcagaaatgtctggaaaccatgatttcgggtcatctaaataaacccagggatgtggttctgtttagaatctgctgagcctgggtacagttctctacagccttattttacattccacaaacatcatacaggggttcctggtttgctgcagcctcaccagtccctgttttgtgatcataggtactaatgaaatagctcactgtttggattaacattttcctagtggctgatattgaatatctcctcctatacctgccagccatctgccatgagttcttgggtgaaatgtctattcaaaccctttacctactttctggctctgttcctaggttttctgccattgagtcctagaaatgtcatagaccagtggttctcaacctgtaggtttcaggcctctttggtgactgaatgaccctttcacaggaattgcctaagaccaccagataacacagatatttacgttacaattcataacagtagcaaaaaaaaatacagttatgaagtagcaatgaaaatagttttatggttgggggtcagtagagcatgatctgtattaaagggtcgcagcatcaggaaggttgagaactgctgccttagatgatttgggcattgccactttacttgatgtctggtctataatattccctcccattgcatgggctgtctctcacttggatcatctcctttcctgtgcagaagggtttggggttgacgtaagtctacttggctggttttgcttcacagcctatatttgtagttacacctcaaacccaaggctgggtccatgtcaaacatctggtcaccgtgttttccaatagttttatggtttcagagtcttgccggtgtttaatctatgttattactcatatagagtgaggtagggtccagtttcattcttctgtatgtgggattccccaacaccgcttactgagagactgtctttcccctttgttgaggctcagtcagtatgtaactttattcccattcatgcatctagaagtctgtttttatgccaggatcatgctgtttggttactgtagctttgtaatatattctgaagtcagggtccatggcacctttaattttgttctctggccaatattgctttagtcattttggggcttttttgtggttccatttgaattttagaatttttaaactatttctgtaaaattgagaggctgtgagtcttatatagattgtgttgaatctttgcagcgttgtggttgcttggtgtagacatttgcgagatactaaaccttccgatccaagatcacagtcaaggatactcgctatatattcatattaagcatagttctagaagtcaccagaagaatgagataggaaacatgaataaaaggcaccctcatccaaaaggaagacgggaaactgtccctatttacaggcaacatgatcttatatatataaaacatttagttgggcatggtggctctctctggtgatcttaactctggacaagctaagacagtagaatcatgagttccaggacagctcagacgatagagcaagactgaatcaaaaaattctgtagatatccttcaaaaaactgtctcaagccaggcatggtggcacacaccattagtcccagtactcaaaggcaagtggatctctgtaagtttgaggccagcctgatctacataacaaattccagaccacccaaggctgcatggcgagacttcatctctaaataaataaataaaataaaataaacaaattcaataaagtcccatgatgcaaaaccaacttgcctttctacatactgataatgaactatgcaggaaggaaattaaggccacaatcccatttacaatcccattcaaaagattaaaatgcctggactaaacttaactcatagtaaagtaaaagatttacacactgagaactataaaacattgtaaaaagactctagaagtcacaacttgtaagacaccccattagccttaacagaactctcagtgtacagtcacctagcccaggaccttaggcaaagtgactgggagggctccacactcgggaacttccagcgactgacccgactgaccgagttggagtatggcagggtctcccccgtggcagctggcttctctgggccagcctggcccagctgggtctggttggtcctgcacctttcagctatgaccttcaaggctcactattcagcccctctgtgccaccaatcaccttctggcctcaggagcgtgttttctagactcccttgggtgattattaaacgcctcccgctgggccccttacttgaagggcttgattggaaattcctgtggcaggggaatttttcaacaaagctttgtgcctgcagtctcctcacttccttccctcccccaaacatcctaccttccctctctcatccccagcctatctctattggtaactcacctcctgccctcctcagaatcctgcagccacagacacaggtcaggagtggagcaaaggagttgaggcagggattggggggcactctgcctggaatccttcatacctgtagtacccctcagcttgtcccctccacctgtccctccatgcgtggtggccccgaggggtctgcctgtgaagagagagccctcacagaccagcaagcagcaagctgggctgccagaggaggcagacaggcacagtggggggaacagagggcagtaagtcaggctcctcaggaaatgaaactgctctgtgcaacaatgagggagacactctctgaactttgtgcgtgagtgagcattcgattgctcgcattgttttggctccggggaaatctgacctcgggaaaggccgagctgaggtgggtgtgggtagtaatgcaggatattcctcaagggcaccttgccaggaggacctgacttcccagagcagggggaggggtctgcttggcagcctagctggggccaaaagaagcccaaggtaggctgggctctgggctcccctcggggaggggagatttattggctggatccatgggaaatgatcttcaccctgcacctctggaaggtttacaaaatggctaattcccaaatcagcccttgaccctctccctcacccagtaaaaccaaacttcctggggatggatggggttgggctgtggggatggaagctttccaagttgattctgggctgtggccatggttaagtgacaggagcccccccccccccattccaggtgcgtttagtgagccgctactgaccaggcaggagcatccatctctcgggagcacctggccttaggcactgagacccaagttcaaatctcagcagctgaacttcctgacaggcattcaggaaaagcaagtgatacgtagcagccctactgtgcgtggcccattgtattgtgctgctgtgatgtagcatgtgtctcaggcgtgactcaagaagagtcttacctcaggaggccactaagggagaccatgttctgggcatccagatccccagagtcagacgtgatacccctgccggacaccctcccccaggtgtacatgggtaaacttgtatccttcctgtcttagctcttcctcacaccctccctccatggtgagggacttgggggggggggtgcctcaaattcataatcccttgctgcagtctccagggtgctgggattagaggcatgtgccaccgagcctggcagtttgcagttcttatagagtactgaagagctaacttctgcccgaggctgtcagcgtccaccctctgtctggcatgttgttgtggtaatggcttgtgaccccttcctgagtacttcaaatcatttcgtccttctgttggtacttagaggctaaggttcacccatcacaaaaaccctaggattctattctctttcttgacttttttggtgtttgtttgtttatgtcagggtctcatgtaagcccatgtaggtcttagtgcctctaaatcactaagtagctaagagtgaccccatactgtgggtcctcctgtttccatctctcttgagtgctgggatcacaggcttgccccaccacttcaggttgtgtgcatgcaagcagagaagtggtctgactgcagttctcctgtgagccccaggaagaaacattgttgcgatccccaccccctttcaacgtggcaaccgcatctgcagaaatgacatagcccagtgggttgggaactcagtgactatgggggaaagagggtagagggggagcaaggaacagctggggacaaagaggaggcacttaccagacccacgctggtgtatgcaagatgacatccaagagtgtctagaagccttaagcctgaaagcaataccagtaactagagcgatgtattctttcaactagcaacaagaaaaaatgctacttccttactggactaaaatgccctgagacaacaaagtcaccaaagtttggagacagaggatcccagggaactcaagcactgtgggaaatgtagccctgcagattcagagtaagggacatgactggggaagggaatggtggagccctagagccttctgagcagaaactgggtcctagcccctcactgttgtgggaagtgtttgtagtgtaagagtcggacagggcatgaagggaggaaaggaagcctgtaaaaccaggaggctctttctccttgaacagtttcttttcacctttaatcttgagtccagaatcttagcagaatgtttctctgagcatgcagccaccccaggctgggtacccaaagccctgagctcttagtttagcatcggagtccctacaggttccaaggctcaagttatgaaaggttcaacccttcctggaaccctgctaaagtaacccacacaggtttagtaccccccccccccacccacccgtgtgtgnnnnnnnnnnnnnnnnnnnntcgctcgtggtgtgataccgacctgtgcagaacacaccaccgccaccatgcatccacatccgcatgcgcatgcagaggcagtgcctttgaggcagcttcacaatccagcaggagttcccacccagcccaccagcctttcctcccccacccccaccccataacagttctgcttccttagccaggctgagcacactgacatgtgaaatttgaagccagtgttccccttagcaaccatggtaacacaggatctgatagagagcctgcagttataaaaataccagcttccaccagacactggtttccaaagggaaaccagtccccacaccagaaccatttttaaacagtcttcagacttcagagatggccagcatgctcctagtgcagtgtggctgccggagactgtcacagggggctggctggcttatagtaggcagcgttgggtatgttctttgaagcacagaatggcctgtgattcggcaaacaatgaactagccctatcaagggtacattggtgatggtcattttcctgattggaccaactcttttggcatttttaagtcagggtgagatgcagagattctgggaccctgtccttccgggtcccttctggagagttctcagctccttatcacctgggggacaatgacttggtctttcttctttttgtggaagtcaataagggctctcatagggaggggagagatggtgtggctaaaaacttttccacttacaatcaggaaaagccctgcatcttgtacccagttctgagcaggctgcagtcttcgttcctagtctgtgttctcagtaggaggcattagccttgagatgaagcaggggcctgggtatgtgctcacccagcctctggcctgttctcctctgagccccgcctccccatctcagtaacagcctcccctgccctccctctcctgttcctcccagccttttgtctcccggggctatgccttgtaatttgaaaaatattctaacttggtaattaatgtctgaacttggagagcgcccccatcctgcttctgcctagctagctgaaggcgggccaagatgcaaattcagagaagctaaaaggaggcatgggattttccaagatggtcccttagttttgggggagggggttaaaaaaaccacacatgagttgcccttgaacctcccccccccccccaccttggccatttcccaacaggccgatggcagagtcttcagctccacaaatttgggaacactcaagtactagacagggccactctctgagagcagttcacagagaaattatctgaggtggggggagagagagagagaaagagagaaagagagagaacatacaagcaagcaaactatgtgtgtgtgtgtgtgtttgtatgtgtgtgtgtgtatgtgtgtgtgtatgtgtgtgtatgtgtgtgtgtgtgtatgtgtatatatatatatatatatatatatatatatatatatatatatagagagagagagagagagagagagagagagagaccaaaaggaagattggagagcattagctgctcttccagaggacctgggtttgattcccaactcatggtggctcacagccacctgtaactccagtcccaggggatccaatgccctctcctggcctccatgggcaccaggcaggcaaacaaaacactctaaaggagaaggaagacatagagaatagctactcgggaggctgaggcaggaacaccagaagctcaacccttggttacagagtgcgttcaaggcaaggttggacaactcaggaagaccctgtctcaagataaaaggtaaagagggtgtagcatgagaaagatctgggttctggggtcaaggagaagaaaggagggcaagggaggagggggatggaggaggaggagggaagaggaaggtgtcatgagtctattatgttagaaacatacatggctatgtttgtgtctttccagtttgttaaactgaataaaacatatccataagctacatattggctacaatttgccacatagttctaatttcacttaactaaccattagcaatattggtttctcttattccaacttttaaaaaagttttctagatttctttattttacttcatgtgtgtgaatgttttgactgcattcatatatgaattcctcatgcgtgcctgttggatttcctggggttgggtcatgatggttgtgagacacgatgtgggtgctgggaatcaaaccaggtcctctgcaagagcaagtgctcttcttaactctggagtcatccctccagcccttactttattagttgttaatatcaactctcaggtcatacattatcgagagagagagagaagagttaagctgtttgggccccagagttattcagtcagtctcagagatgcctcttcaaaggccaatctgaagtaggctgagtgtcaggggcaggagaagagcagtcaagcctgacacagaggcaggagccctttgctgtgtggttctcctggccatggcttgcggtgtgcgagtaggtgaccagtcggcatcccaggcacactgcagactccaggagtgcctcctctacactctcaggcgaggggtggtacatctgggtaactgacaagctcgcgcgcttggtgtttctcatatcaatctaatgcagtttcaggctgttattgatcggcacaacgaattatttatacatttgtacttctcgctgttttggcaagtggtagtgacttgtttgtgtaaacaagatgtggagttgttctttcacttgatacttatacccaaaatgcagcgactcctgtactgttgctctatgggggagtgggggtggggaggagtcactgtgggctgggcacagcccgaaggaacaccatggcctgaagtaggcccagccagttgtctaggacagaaaacctgacgcttgctctaggacctggaagtgcctgaagcacaggagacatgcatgccacaacccgtgatgttctcagccttcagtggctctgcagaccccagagttcacagttagcctggctgattgatgctactccatttccatcagccccaccgtgggtcagaaacggctttgggagtgtgtgtcctcctagaagagaaacccagaaatcacaccccttccttctgtctacttagacgcagctagaacccaggtcctttttgataggtctgggtcagtagacacaggaccgagacttctaggcctaagccaagccctagaagaggaagcctaaaggagaggcccgttcttggcaagaggggcgcttagaaaaaaaggtggtttggaagctgacgaactaacaccttcccctctctggccttcaggcttctttgtcaggaggcaccggataaaatggtttgctcattacaagctaacttcctctctacagctccctgtctgtccctctacagctctgacaagtgaagacagggaataagggtccctttaggtgtgtaagacaaagtgtctcttaggaagaaaaactaaggagagggaagctagtaaaacaagcctttgcacacacagtgtgcctgctcttgcacacacagtgtgcctcctgctctccagacactctgagctctgtttagatttcagttcctcagaagggtcccaaggactcgtccgtcattccccagttggctacctgtccctgtcctcagcctgccttctttctcttcatgacaatacttgctgttacctcgagtcttctttgtcaatctgttttttttttctaccgtgggaactctagaggcaggaaatgtatctattcatagctccgttcccagtggtgtctgacatacggtaggtactcaataaacacttattgaagaaactaacgaaataacttgtctagaccgagcgaactgaagacaatggtcagtcagtcagtcaatcagcctttcataaagaactgggggtgggggtggggcaggggagaagtgctgggggggttggnnnnnnnnnnnnnnnnnnnnnnnnnnnnnnnnnnnnnnnnnnnnnnnnnnnnnnnnnnnnnnnnnnnnnnnnnnnnnnnnnnnnnnnnnnnnnnnnnnnnnnnnnnnnnnnnnnnnnnnnnnnnnnnnnnnnnnnnnnnnnnnnnnnnnnnnnnntggggcaggggggggagcttgtcagaaagaagtgcaggatcctcaaggaggcccagtgagaggcacagcaggctggtctttcctctgcatccgtccatatgcttcctggaaggtgcagatttaattcacctgcccagagtcaggatcccataagccagcatcctcaggtgagaacagaggggttccagcaaagcttccaggagcctccagggaggacacccccaaccccacctgctgctatcagctacacaggacaatccaaggggacatcagccaaaaccctctgtcactaccataaagaggaatgagagggaggaccccaggctcagagggagtaccccaggctcaggagggcccctggggatcaaggatagaggagggtaaagcagagcgggaaggtggagcggctggggtggaacgctatagtggccgctgagaagcccagtagttctttccagtccagcagagtctcagccacagaaccgtggccggggttgccatacgtgaagccacatctgcagttttcaacttttgtccgttgtttttgtttattgttgatttgtttctgtgacagggcttcttgtagccctggctgtcctggaactcactctgtagtccaggctggcctcgaactcacagagatcagcctgcctctgcctctgcctctgcctctgcctctgcctctgcctctgcctctgcctctgcctctgcctctgcctctgcctctgcctctgcctctgcctctgcctctgcctctgcctctgcctctgcctctgcctctgcctctgcctctgcctctgcctctgcctctgcctccacctcctgaaggctgggtgtacaccaggaccttctggcttgcaactttcaatcttctggtagccacatttaaagccccccaaggcgtagggagtgtgtgtgtgtaaaatatttttttatcaatggtatccaaataattataattacatcaccatgtaaccaatagtaaaaagtaccaataaaaaatttttgttgccattgggttttttttgttccccagacagagcctggctctgtagcccaggctagtctggctctgtagcttaggctggtctcaaactctctgtgctcctgcttcagcctgagagctaaaaatcactgcagcaatccatatttttttatattcgtgtgtttgtgtgtgtgtgtgtgtgaactaagtcagtgtttgaaacttggtgtacatttcaccatgccggcaccactcagttcgggccagacaccttgtaagttctcagaccacacgtggctgctggctacggtagggaggctaggtaggtgtcatcaggctcttggaacagttctggatgctggaagtcccacaagtactgtttgcagcttccatctctctcaacacccagcagaaatggggagccataagagctgaaccccaaggctcacagccagctcctggtggggtctatgaaaagcaggtcttcaatccctgatggacaaagcaggcggggggtggagaggggggcaggagtataggaagggagaagggccctggctggggtggcagcacatgagagggctcagaggagaacccacggtggggatcagtgccagggcctccctagagtgcccggcatgaagaaggcacaatcggcccattctttcactgccctccggactacttagggcgaccatttctgtaattaagactttctccctttctcagaggtattaaaacatagaagtatttactgcatctggtttcccagggttgaaagctagctagacttaggaagtgcaaacactctttggaaatgcaaacacacttgcaggaacgaattctctttgaatcaaggctgaagccctccttaaaacaattagtcctgagaccagaaccttaggtacaactcccctttgtttggttgtgtggcccgccaccactaccttcacccatagggggatatgaccagtcctcggggcccagggacaggaagggaatgaattggtctgctacttctgggtctgggctggcctgcgttccgcttggtttggaaatgttagtcagaggagagtttgaggtgtggggaagggcagggaggatgtggtttgggcaaggggagtccagaggcttccctgggcttggcccagtgccatgggaagtctcagaacctctgccggccacactgaagtgccctgcctggctggagctgagggcgtggccaaggattagctgactggagagcaattagatgaggtggggctggggaaatacctggaaccccagggatagagtcaagacttgcttggctaaccctgaaggccggaggccttggggggcctggggagttaagtgtggcctcttgctgatgggcagaaggggattataatgtcagggatcagggagtctacagcactctgagaaagaggcttttttcttgatgaccagttgctaaatacctcttccacctgctcacattcctgcccagacctgtggattttcctgtcatagccgcatgggcttgggaggtgtggtatgaagtgacccttctggggatattcatctagggggaaggagaagtgagaaaaatgggtgccttgaaggaaaggggtgctcatctatttgaaaggtgtgggcaagccctgccaagactgttgcccagaaaacccccacaaacattacagcttgcctaagtcctgtcctctgcacagggaagcagacttgcatccgaggcctgtccatccgctagaagcgaagtctcaggtgtgcctatagacgttgagagctctcgattgctcaatagaagccttcaggattaccttcatgccacatgcagaaggctaagggctgatcagcccagagcaggagtcccttggttccaaaaagcttcctcctcacccctccctactgcttccctccacagaacctcctccacagagccatataggaaatactttttaggctttgtgggccaataggcaaacccagtccaactgcatcctatgtcttgaagtacaaccagccatcctatccccaagagcagctttgacagtgactgtgcttcagggaatttatggacactgaaatctgagtcataatttgtacgtagcacagcacagccttttgaaagaaggggactttaaactgattccctatgagtttttatattttaaaaatctaataaatataaaaatattttaaaaatataaaaactgttcttcgctcgagaactgtgaaaggcaagccttggccggctctgcttggtggctgtagtttaccaaccctggtctagagctgtggttctcaactgggaaatccccattcaggaggtttttttgctacactttcgagtgagaattgctgtcacaagggagaatttacaggttcccaggcaagcagatgccgtagcaatagggccctgccctagtaccatactctagtctggccccatgcctgttttgtagatgacagaactaaggtccatgtgacagaactgtcctgtgaacccaggcagtgtctcgctcttcccagaatgcagagctagaggagtttttatctgtttcgagccactctgggagatctgccctgccagctcacactgcccggagctctatctgagacacaggaagtgtatttgtcccctggagtcccagcatggcagggctttggtgagtcattttccacaagtgaagctgggtacactgaagtatcttcatgagaaactcccagccagcccagagccttcttctccttctctctctctctctctctctctctctctctctctctctctctctctgtgtgtgtgtgtgtgtgtgtgtgtgtgtgtgtgtctgctctctgggaagagggcattagaatgaaggacagagcatcagatgcttagagtaacaggatttgaagatgccacactggtggtgttttagctgcagcctggggcaagtcctttttcttcagtaacgtgggagagagttttgtatctgcttctctcctacaggaaacgagaaatcaaacttgtcaagaacagcactgtatctttatcggtcatcctggcttcccccctaaccattcaactgagaaggcacatgatctttctggtgacacgggagacccatcactgtgttgatggccctatggggcagtcactcttcacgtccctgacgcgtttccactgatgacttagtgtgagaagtgttgaagccacatattcggcatgcctgtgtggccctcagattctggggacccactgagacatttggatataaacatctgtgaacctgtgtgtgtacactttttctggggaaggcaacagtttccatcaatcttcaaagggttcaatgttgccaagaaagtcaaacatggggctgagccatgtacttagttgtagagcacctgtttctcatgtgccacacctgtgtctcacatgggccacacctgcatctcacatgggccacacctgcctctcacatgggccacacctggcttctattcccacacgcccggcaccaaacacaacaacaacaacaaccactacaacaacaacaaccatagtaagttcagaggcactagcttcctcccttcctatccggtgtccttgggcacattagagatgtctcattcagatctgaatttctgtcatctcctaccttgtccaactaattcctaaaatctaagggcagattctcctggaagaaaactccaaaaccgagtagctgagaacaggtagggttagggaaagtgctgctgtgggaggagctagctaccactgcccatagcaacagattcaatacaaagttgcggttcccaaatgcagggccaggcagtaggctcagccggctgcggaggcctaaggggatgacggctcattgcctctgggagcagctctggttccatttcttgacctggcattccttttatgaaaaatatatccaaacacttggaatttgggcacattttcgcaagtgttacatttaaataaaaagttttctcagcgatgtccaactgagaaaagttaaaaagatgttacaaaatcacccccttacggactatgtaatttcgctacaaagttagcacagagctgaggaaagtcatttatacataaacgcaaataatagtgtaagattttaaaatactcctaaagccagctttaagtgtctctctccccaacccaggctgctatctaagtctgcttgcataaccttggctggctttaatcttcttatgagcccacagactgcccaggctgcctgtcagccacagtgggcctgtctaggttcccatctagctgtgatagtctgtccaccagagcaatggccccaactccaatgtacctactcctcttcctgtcttcccagggtcctctcctatctcttaccttccattacctgcagtgggagctcgttcacatcagccaattcaaggggagaaacctgcccttgaccccacactcccctccagcaacccctttactgtacaactctgtagagccaggtcttgcaaaaagaaaaaagaaaaaagaaaaaaagagcagtctccttacatgctgtctccctgagcagttctgccccaccaagccaacagcatagaacctgtcaaggctaacgtatgtgttaagcatccattatctgaaagtccactgtgttccaaattcctagactttttgtatacctatatgaatccacagatggaaaattccacactatgagactttatttcatgcactaaattagtttaaatgctatatagaattatcttcaggctgtgcgtctatatggtatatataaaacataaacgaatctcgtgtttagatttgggtcccatccccaagataactcagggatatgaaatattcaaaaattgagagaaaaaaatcagatatccaaaatacattcaatcccaagcatttagatagaataaggagtacttacttgtatttaccaatgcctcgggactgttctggcttcagcctgactgacattggctcaaaagtcagctacagatgacacattgtagattttggtcatcatccttaccattgtcattattgctgttttgagactcatttcatagcctaggctgaacttgaaccagccactctcctgctttacccgtcgtaagtctgcaggcatgtgtcactgtgtctccttatggagtaaatgtaaatgagtgtacgtgactattccagcacactttttttgttttgttttgttttttatggactcttgaagtttgagttttgtataatttttacattgtagctaaatacattttcctcggccatttaaaagtgtgaaagctgttcttagctctgtagagagcaaatgcccatctgaaaatcagtgcacagaagggcagtggtgggctgggtggggtataattccacgcgcagctacggttctcagctatgggtatttggcaaggtctggatatattctagagttgtcactactaagggtttctgatggtggctggcaagtagaagttgaaatgccatagaacattctattctgcacaggaaaccaccacagcagagttatgtaatacagatgtcagtcacctatagctgagcgccctggtctaaatgacaccatcggctaaagactgctagagccctggaggttcttctatgctaaagacttccctgtgcctctccagccagaaccactcctgagctccaggccctgccagatcctctctccagacagcttcagtggtggttcatatagcctctgcccatagaaggtttgctcaggctagaaactcaggtgggcattctcctcgacttctccctcctggtccccagatgaatcacttcccagctgcctgtccccatgtaaacgaaggaaataaagttgatcgttgtgtcttcctgaaactagtctccctcccagtgacctctgaagcaagcagtgtgagcacatacttacggatgcaagatgggatgaaggtgtacagatcgcctcctcagaatcaagggcacacagtgcagtacgggagacctgactcgaggccaatagaagtggaaggattagccaggagatgggcaaccctagcccctgaggtaccatcgcaggagctatgtaggatcaatagttcccccagactctaaccacacaaaccccagactgtagtccgagctgtacccatctctctccttaacacctcatcctgcctgtccacagatcccctcagacttctaatgccttatggacccacctcctgctccccaaatcaacacctctttgcagagccacccacttgtggctgcactaagcccaaagctgtttcagactctcatcttatccatcctgaacctgccagatcccagggctgtggacaacttctgcaactcccttcgatctgatcactttgttctctctcagtggctcagctaggctactctaccttctatctgagttactaaccagtattctaaccatgctttcctctaggcccctgccctgtttctgtcccctctgctaacactatagcccactgatcttttccacttgttccctgatctccccagaaaggtctctccctgggaagacttcctaagccttctcctccacacatatgacagatgggtgggtgacactctgcctgtcatcccaccctcaccctgtgccccatgcaggccacttagtggtgaactcccgctgatggagctgagcttgctgtacactgggtattccaaacgctttatgccttcatccctggttccagtgttccaagtaatgtgtgtcttcaattcctgcagcaatccacagaggaggagactattgctgtgcccacagtgccaattaaaaagctgagacgcagccaggcgtggtggcgcacacctttaatcccagcaattgggaggcaaaagcaggcagatttctgagttcgaggccagcctggtctctctatacagagaaaccctgtctcaaaaaaccaaaaaaaaaaaaaaaaaaaaaaaagctgagacgcagggaggtggccactaagttgtacagcctaagtaagtggcagagttaggattagtatcctataccctgcattccagacatctatctgctgagctctgggcctctttaatggatggatggatgaatggcaggtagatggataagtgggtggatggatggatggatggnnnnnnnnnnnnnnnnnnnnnnnnnnnnnnnnnnnnnnnatccctgaggggccctttggagtagctttgccctagacagtatatattctttcagacctagtctttcagtcttccaagagggtcagctaggcacaaacctagcatgagcaatgtgaagaaatctagtcttcacagataccacaggctgggagaaaccaaatagttgcctccagaccaggaatagtgagcttcttgccaaggacactaggggagctctcgggaagacttcagggagcagggggaagggggagaagaggaggacaaaagagggctagggatgaggaggaggggaggaagggtgtgaggtagtcttgaattatcgaagaagtggtggagcaaggtgtgttcagccggggagtgacgatgaggaagaagggtattggggggctggtgaggacaggaaggatagcaccataggtctgcaagccgacaagcttggccagaaggaggtctggaagaggagggaagacaaggtaggccctgatggaagtgggccagggagcagaaatgccagactcagcactttatcttctcgagacacagtcagttgaacacagaaggacagcatggagaacaagaatcttggctggaggattagtcatctgaaaagatgcccccagctgtggtagcactgccccattcttgcatgtctactctgccaagggttaggctctaaaaccaaacacacttccaggtgccaattaaagtctcttatctctgagtcttggcagagtcctcaccaaatcccttctgaggtccccaagtggccccaggccctttgctcagcccaggcctgcctgtctgccctcctgctgggtgcctgacactcttgagtacaatgctaattatgcctttagcgaaggcctattattctctgaaagttaacagagcatacttgtcccaggcccagctgtcctgacctgtttgtccttgcttacgtctaacccattaaggagccggctgggttttgtcactccaggaacagccctcagtccagcttctgcagtgtggtttctgcgaccttatcttctccgtcatagaaaggccacgcccctgactaggatccagaggatccaggtagctatggactcctgtgaattcttttttttttttttttttcgagacaggctctctctatgtagccctggctgtcctggagattgaaatgtagaccaggctgcactcacagagatccacctgcgccacctgagtgctggaattaaaagcatgccccaccatgcccagctttatgggctatttgttttgttttgttggtttttttaagacagggtttcctctgtgtagccctggctgtcttggaacttactcagttgtccaggctggccttgaactcagaaattcacctgcctctgtctcctgagtgctagaactaaaagggtgcatcaccactgcctggcattttacgtccattcttttttgtttgttttttgttttggtttgttgtttttttttttttttaagacacacacacacacacacacacacacactgtagctgtcatcaaacataccagaagagggcatcagatcccattacagatggtgtgagccaccatgtggtgctgagaattgaactcaggacctctggaagagcagtcagtgctcttaaccgctgagccatctctccagccccttatattcattcttaaatgcatccagagaatattgatacatgggagagactagtttaaacagcatgtattagttttgcttacacacacacacacacacacacacacacacacacatacacacgctcaatggcagaagaatggctcagcatgtgacaacttctgtctctcaggatccttgccggtcacttttgcactgtcctctcagagtctaagatggattatggcccctgccattggaagaacagacttgcaagggttgacataagctgactacaacgaatctctaagaggcttcctcctggtgggtacaagggaaggtggctggatcggcccaccagattatctccaggccctatctctaagtgaggtcctcgagatgtccgggagccacttcctctgtaacaaacgggcgaggctcctcaggtgtaagataccagaagtcttcaggtcatcactctattgacagccacctcccccgtcatctctagtgattaaatctatttgtctggtgttgtggaagggctactcctgaggagtagcctctgagctatgcatggtgacgaagggggggaggagggagatacagggaaggaggagggggctcacagaaggtgtgccttggctagcgctcttgcaactctagacagcagcatagctacccccaggaagctcgctccataagaggaaaggacagtttcgcaagtgaggctggacctggggagctgcccgttggtccctggcacggcactgggcctgttaggaaatcagggagacattgtgtctcccgggcaggcgccacttctcacttgccccggtcgtgctcacttcaggcgctggctccagagccaggctggcagctgggccggtggctgggtgccctcttgccacaggcctgatgcccaggaagccacagctacagcttggaaagtatccctcttttgggtcccatggtaaggccagggggctgtgaggagccatatgagcaggaggtcagctgcgtactagttacgaagaattccagactctttcctccagaggttgagcgccaacgccctcttgtcctttcctgtcaagtagggattcctctacacacacacacacacacacacacacacacacacaagaaagccccacccaagatgcccagctcccaccctgacttgaaggggacggtctgcctctggttctgtaagtagcttagagctgtgaaggtgcacagagctaatgttttaatattgtatatttgaaccggcaaaggggtctggggtaggaaagagggtgtttgctatcttgggggctgctcaatcaaacaagatgtttcttagcggagacaacagccatgggaatgggtccaagggcaataatgaagtgtgtctagtccagatgggtgcacaagagatgacagcaggtaagccatgaggctgtgaataaggataggcacagtacagcccctgcttccttgggggtgaactaggcatgcctttctgaggaactgtcccattttgaaggctgtgggaatacagccagcatagaacggtgtgaagtcccttgaaggtttacggtcaccggagtgaactgtgggagctcacactgtccacaccaagagcacacctagcctcgcagcattcccactgcaccatggcccatttccaatcagtagtctacccaaatcatgcagactcgcccgccgcctaagatgttcctgagaggcagaggactggcctgcttgactcctcaaggtcttcttccgaccaagcagtccctctttcgacagtcgagttgctatgggaactataaccttgaatttcctggctctgaggctgtgaaaatcacaacctgaaccttccgttgaagtgggtttttcgattaatttcctgtttgattgtttactttagagagcggaaaatgcctttgcagcagctaggtccctttacccagaggctgtcacaccctccctgcaaggtcaagtccaggccttgggtgggtggagggactggggggggggggcggcaggggagagcaaagggccagggcagggaggaggcccagctaggggcaaaaggcagtctgaccccctatgctgccctgtttttctccttgttcttcccagggccccagcatggtgagacagacctaggagttcccactctggccctagctggggagcctggccacccacccagagccccaggcctggcccccagccagccttaaccctccctgactcagagaactattcggttctgagtcagacacaggccacagttactccattccttcagagggtaatgtgaggggtgatcgcctggaagggcccctgtgcatggctccccaagctaagctgccccataggcagctgggagaatgtctgccttggtgtcttttatttgctgcggccgagagcagtatgtgatatgtcagctgctgtaactccatcccaatttccctctccctctctctctctctttctctctctctctctctctctctctctctctctctctctctctctctctctcgtgtggggagggggcaaggcgaagggttggcaggcaggctcaggtaaggcccaagttccctcccctttgatgagaagcaccctgtgataggcattggcaacccaggccttcctccctgtctgcatattcaccctcagagagaggcaggagcctgcgcctgccttattagtggacatgctgaccccagggcagaggtgggattgccttgtgttctcggacctgtgaagtaaactctccaaagcagggcagtttgaagaagtactgttccgaatagcttccaaatgacgggtaaaacctgagagtatcccacgcaaaccaggtaagcagccactcacccttcccaggcctgactctgtgcagctcactgggcagcagtagctaaaccacattgactttgaagccagatgagatctaggttcacatcccacttacccactgttgcgttctctgggggaagttattttgtttctcgcctgtttcccctagcatgagaaatcattagagtgtctaacagggggagaagggtttaaaaatggacacaaagctcacctaaaacaagcaccgaaaatgtaattcaggtaaccgatcagacgcccaaaggtgctgtccagcattcaggagcctcctcttggggcggggtgtgggtggggagctacctccagtctctcctctccttaaagcaagatgggtagatgcttaggtaactcaaacctgaaaagacaagcagctcctagaaaggactagaataggctctacaggcaaagctaggaggctctgactgcagacatggttgacctttggtcctgggaatccatagttgcagggattgtgagcagaactcctttttattcgggccactgaccagagcttggctccccagaggagccactcaccaccggggctgtggcccctggctctggtgtctacagaaggattcggtgtctgctgagggcctcagatgatatttccagtccctggggccagctgtgggtgaagcactacccccatgtgacatttagtgaggtcactttgtagtggaggtttgcaagctctgcaagaaggaaactaatcagccctcaccaccgggcgggcgcctggtccgtggctagggtaagctgctcacctccattacagggctagcagccagcccttgggcacagactcagaccgaatgctagggctgaaacatgcacttccttgacatctgaccctggccaagctaccaagactcccgttaggctattagacaagtaacattagggaaaattcccctcttgggggtatccaagatgcaggcagcacagatattttcttagacaatgctaagaaattaacatgtgaacacgccgaaccccatagctttacccgcagtgtggacagcatgagcgtttacataagcaccttcacagcccctgcatccagagtgagagagcccttctcttaccctaggctgatctgtgtgcctaatccccctctctcctaactctgcccaatctggttcaatctgaaacttttaaactggttacatatccccctgcctccacacacattcctgtcaaaccaatgccaccctttttctcttgatgtcttctctcccataggcgaggtctgaagaaaaacgagagcgggggaagggcagttggaaagagagagagaaggaggaagaaacagatattggagaggcccccaagtaaaagcaagcaggagtatattctttctctgtgtaccttgggcttccttcacattctccaggccctggtgtctagcttctgcctgactctatcacgcactgatgtcatcatggcaaaggtcaccctctttcctaatcactaaatccactgtggtcattgttcatcgtacttgatctctccaagcatttgacctgctggccttctacttcctggaaaccttaccttccatgacgcttcttcctctagctccacttagatctctgactatcctccccttcctcccctgggactcatcctctcttatcccaggtcagaccttctcttctcattctgtgtattctccaggtcacctgattcacaccgatggccttgactgccccgggtactgagccaggtagccacttccccacggaactcgctcactcccgccttcccatactgttggtggctttgccacatatgcctctgattaagcttcaagcaggcttcctcgttctagtttattctccactctttgaaagaaaggatctttcttaaatgtaaatatcatctgctagtctcccatttaaaatctttcaggggatctgggcagtgatggcgcacgcctttaatcccagcacttgagaggcagaggcaggcagatttctgagtttgaggccagcctggtctacagagtgagttccaggacagtcagggctacatagagaaatgctgtcaaaaaaaaaaaatctttcagggctcttcagaatcttgagattaaacacaaaacaaaacaaaacaaaaaaaacaaaaacaaaaataaaacccagcgttgagcagcacagcatctaaatccagttggtatttgtccctagccttgtttgctatgctatgttcccctgcccctagtctgtgtacttcaggtatcttggcacactgttggcatactggccagtgcagtggtgaactcggcttgctctcattgccttagccttcagacattcttttttgcaaaaggcctggaatattctccactaccaccactattctccctctactctaaccccatatgccataagtctctctagtcttccctactatgttgtaagtcttatcattattttgtgtctacattgtgcttaccatatagggcattccttaaatattggggtatcagtggatgcatacttgtatggatggatggatggatgaattgatgaatgggtgggcggatgagtcaatgtgtagatagaagggtgagcgaatgggtaagtggatgaatgaataagcagatggatgagagtgcacagatgaatacagttgtcaccagcgaaatcaaagaacaggcaaaatcaatgccatgttgtaaaagcccaggctggcttttacagctaccagtcagcagaattaagaattacgagttccagctatcagactaaaaattagctagtccaggagaaatgaacagtgctctgtaagtcagaggatgctgacccgggactctgagctttgtctaactctgctcagactctctgtctgccttctgcaagccacttaactactgtggctcagtctctctgtctattaagtagagataacaatgcctgtggcctttgcctgtctccacaagagtgtcacgagggtacaaagtgtgttggtatctgcagggaagatatatgtttataaagatataagtataatcataataataacaccttgcgtgcgctcggctcgggctttgtgcttttcaaaagttctcgcctatatattatctcagttgactctcaaaacagggaggcagatattatccccattctcggataaggaaactgaggtgcagcgtcattaagtggcatgccctgggtgtctcttggtcagtggcagatcctgactgtcagcctgctgcacatttttgatgatagccttttcttggatagattatctgcctccctgaacagagagaagcaggcataattgacccctcttctggatgactcaaggtcattaccatgagtatcagttcctgtgttgtcttttagacttggctgtgatgcaggcccagagccagcagaggcataggatagacaggctctgacgactgtggcgtccccagtccaacaacctgtgatcctaggaccacgtgctagagctgtgccctatctctcgctctctcttctttctttccactgtcagtgtctgcgcccatctctgagatgtccaccccctccagttctttgatctcctttttgatctttctggccttcagcttcttccacgctttgacatttatctttctaggtcttggtccttccatatatacatccagccaatcagaacattctgatgggctctggtctccaacaaggtatcaagagtcacactctatagacttctttatcctctacctgccttgcttcctccagcctccccataacctgtgctactgacaacagagtcagagagagctctggctattgtatgtgaggcagctgggtctgttctccaagactgcaaagtgtgcctgtggagagccgcggtagtcaggaagggctggccagcatggtctcaggttgacaccctccccagtgagacacaaagctgtggtggtctccttgatcatcccaatcagcacatcaaggcaggcccacgtgtccttccctccgcaccttctttctctccctgctgggtggcatcccaaaagccagcctggttccatactgggcacgccttgggcagcttgcccatactccatggcccttcccaggggggggactcggggatgctctttctctagttgctgtcaggcctcccacagcctggctggagcacctcagcttcttctccctgagggaggatgtgaagggtgtgcccacaacaaggctccggcagagacaatagcccaggaatgcgttcgcttcctaacaaacactgtgtgggctcgcacaattgccttggattctcgtccaagaaacacatttcacagtgcaagggtgcgggtggcttgcctgccccagcccgcccacatctctctctatgccaaagacttggatgaggggtggcctgttccccacccagaccttcaccagagaacgtaggccatgcttggtgcagcccttcttaagagaagagactcagaaggacaatctagtcttccagagggttttgctctgattactctttttatttatttatttatttatttatagccagttatttttgttgtggtaaaatatacgtactataatacttagcattttaaatatacttttaggccattcacgttgctttatgatcaaccctaccgctacggagactttctatatttccccaattgaaaaacctgtctccactgactaagtcccaccccaccctgcagttcccatcagctaccatctgctttctgtctctatgaatgtgtctgtcctcagaacctcatgtaagtagactcaggctgcgtttgttcttttgtgcctggctcctctcagcagtgcgtgaagggtcactgaagtaaagacacatcatgactcctgaatattagtcagccccagtagatgggtcattcatttatcctttgcctccaatgagggacacctgggttgctctgcctttgattactgccaatcatatggccctgaagaagtatgcgagtgttatgtctgttcaagtggccactcccttttggagaccaatctttgagttcaaacaactgtctctcctgaaaaatcccaagtagaacacgcatgaatgagaaaatggcttggcccctcgatatacaaacagggttctcctaacccagctgtccttttgggaacctagactcagagaaatgggacacagagcaggcaatctgggtcaagatgggagaatggaaaggttctgtacttggaaggatgtctgggaaatccacaaagggaaagtccagtagcagatcctagggagccacagatgggtctgggtaacctgggaggatacacacaaaggggttccagggagggatccctcaatgaaggaggcagatgagcctcgtgctagctcatgaagcagaggtggagacttcccgactgtccacagagcggacaaggtacacagcagtcagaggaggaggtcaaaggaactattctacagtcaatgctaaagggttctaggggtccatgttcgacagagagggctgagtctgcatgtgtagggtgagcaggtcagagtccaatgccaggtgtcttcttccctgttgtttgaagcaagttcttcaagtgaaccctgggctcagtaattaggctagaccagtaggcccttgaaccccagtgatccccctgcctctgcctccccaaggctgagattacaagtgtggcccctgacacttgagatttttacacagttcctagagatccaacttgggtccccctgcttgccagacaagcactttaccaactgagccatctccccagcctttccttcctgtcctctccctacgcagcaccattgaagacaagagaatgaaaggcacagccctcaggagcttccttgagaaagcctagcaggcctgcacaacagggcctatcgcacgatgtgatttttggcttagcccagactttcccaacagccaagtaagagataaggttggaagagggaaccttcccccagctctacttgggagtcctgagccatcttccctgtcccaagtgagggattcaggccctgcagggcaggcgcagtggtactcgcctatggggagcctgggatagtacaagggcatggggaaagagcagaggaataaaggaaggaacatggacagacaacggagcctcatcctgtcagagaaggccaaaggaagataagcaggcattggatgggttaagtagggaggagttgttggcttggggtgtcagggcactctgccataggcctcagagctgcttgacactttccctgcgtcattaccagaagtggtaaagcacatgccacagcagccattgcgtctcaggtcctgggtctttgaggatttccccataatattgcttcatttgtcagaaaccaggtagactcttgtggggagatactacaggcccaaaggctgatctctggaccaacatgaccagcacaggtcagcatgtgctatgggaaagctgccataactctcccaccccttgccccagacacctcatcttctgcctgccttataatttctgtagcattttatttatttattggaatgtctacagtatgccttgtgggttttgtttcttttgaggtagactctcactatggagcccaaactggcctaaaatacaacatccccctgccacaggaagtcctgatattacaggtgtgcgccaccattcccagccagccatttttgatttaagaattctctcctgcaaactgtcccccacccccaagaagggctgcgggggaaggggttagggggacctgagggaaagtcacagcaggagtcccagagctatgcagagctcaccttattcgagcctagcctccatctgccctgtggagtaagtggaagcaggcatatctttccctccagcttcccccagcagggtcacccttcccggctttgggattcgctcccagagtgggctagatggaatgctggcctgcttcagggtgagatgccactcaacacttcccagaatgtgtttcctaatcttcaacatggtttcccaagtcacccagatgagagacctgtgtgtggctcttagagcaccccagggacacccccaggacacctccaagggaagtatcctgagctcttctcaggtattgacaatcctgggataagagtcaagaggaagccagaagcagacaccactggagggaagacacagctgtgtgctacagtctgctgtgcagacatagcaggaggtgtgcacgctactatctttctttcactctaatagaatgaagttgataatgggtatgttgtttaaagtgtgcaggtacatgctcagaagaaagttcttgccaagcagtggtggcgcacgcctttaatcccagcccttgggaggcagaggcaggcagatttctgagttggaggccagcctggtctacagagtgagtttcaggacagccagggctatacagagaaatcctgtctcgaataaaccaaaaaaagaaaaagaaaaagaaaaagaaagtcctgcaagtaacactgactgggtcagaggctttgaagctggtaatttcacaatgtgttcctagagcaataggtctcaaccttcctaatgctgaggccctttaacacagttcctcatgctgtggtgaccccaaccataaaattattttcattgctacttcgtaactgtcatttttgcgacttttgtgaattgtgatgtaaggatctgatattcgagatatctgatatctgataggtgagatagctgattcgatctctgtgagagggtcgtttaccaagggggttaagaacctctgccctagacggcaccggcgcaagctatgtgtttgcagaaacatccgttgcaattctgtgccatgtcctttctggcgagagaggtatgtgagatggtgccgctcacaccctcctctgttaccttccaaggcgagatatatatatatatctgaaggcagtggcccctcagcttggcccttcacttacctcctgtagacactgccagcttgacaggctatcttcctgcctcccaaattctctttctagcagattttattattattattattattaagccaggggctgaggacaaaggtagacaaatcaggccttggtcttataaaacttcacttgtgatggagggagaggacaacacacacaagaagagagagatgtcagggaccctagagagatgtcagtggaccatgagtgggcgcatcagtgacactttcctagggagagacctatctgaagagtcgtgggggggggggcctccatagggcgagatggtgaaatctgtggttatggggtggcctagaatctccagggacagaaatacaaagatcagaactagaactgtgatatgtgtgagacgtgcagttatataccgaaaatgctgactgcgagccaaatgtagcattataatctcagcactgggaaggctgggtaagaggatggctagttcgagaccaggctgcaccttgtatgaaactatgtctcaaatggggggaaaaaaacaagcaaaacattggtggtacacacttctaatcctaaaacttagacagtagagacaggggcaccaagaattcaaggtcatctttagttacatagcgaattcaaggccagcttgggctacatgaggcctctgtctcagacaaagaaaaaaaaagtgaatctcacattaaatgaattatgtctcaatttctaaagagagagattgggaagacagggtggataggtggaggaaaccttggtgggatgtgggcaaggcagcctggtcatgccttagttaataggcacttattagaacagaggagtcatagctggctttgggtttacagtgttgcacctgtggagaaccatgtgtgacggctcagctctttcccacaggcagatcttgacccctgacccagtgaagatgttggtcaccaatagcatcaaagctgggccaggaatgagcagaacagcggtccttctgaagggtctagcagccgtgagtgtacagcctgaccgttttcttctctgccctctcttccacagctcttgcagtcacaggatgtgaaggaagacgcagtcctctgctgttctatggaggtgagcggtgggctcagatggcctgatgtccagactcagtgccctcaggccttacagttgagggaaaccaaagccgttagggcagccactggtcctgggagctgtcagtggagcatgggtaggagcatccatgacacattgctagggagagacctatctaaagcgttgtgtgtgctcggggcctccatagggtgagatggtgagccaggcatgtagaggattgttctctaggggaatcattataggctggcactgtccacttctcagtttgaaggcctcctgctgtttagatcaggtgtgccatacggatgacttaagaggttaagaggttacaagtgacctgctgccctaaagatctcccttcatttccatggtatgcaactgggagaaggcgccaaatgactgagtgagtctcctacattggctcttgggaggcactactcctaatctcaaggtgtagccactgaacactgaggcttcttctggaatcttccttccaaggctggctgggttcttgggacagatccttgccctctacaaatagaccagaatcactcaggatagcacacagagagaagcccttctggcatggggacccagcctatctatgcaagtgagcttactgtacgctcaggtggcaaaggccacatcccaggagctctaagtcccaagaagctgcgcagcagtcttggttggatgagacgtcatgaggttcgtttgttgggcttcagctgggccgctgcatggcacttgcagagcttagagggaaagacaagtcagggtctggtccttcagatagcttcaaggctggcacaagctcaggggctgaggaatgtataagggaaatgtgcatatatccctggaaatcaggagagaggggtcagagtggctcacagatgtctgagaggggcattatgggaaaggtggagtctagaaaagcaggtaggacaagccagggtacagtggcaagaaatgtttagttatataggatcctgcaggagttgttagccagaagtccagaaagattagagtttctcctggccagcattcttttcttttcttttcttttcttttcttttcttttcttttcttttcttttcttttcttttctcttctcttctcttctcttctcttctcttctcttctctttctttccttttctttttcctctaaagattgaagggtctcctatttacctggctggcctacttcagtttgtatctctctgttagttatcatcacagatgtgggcagaggtcagttctggggcaagaggtatgtttgggcttagaaaggagacccatttcccctcatgtttcacacaggcacacataggtactaatcactggtctgtttccagagaaatacctggcagatgggaattaccacaaagatgcttcattgcccacgagagcagaccatggggtcaagccagagtctaagtgtagtcagagaaggcttccagcaggaggggaggtcctggggtagaaaacacaagagatgagttcctggtgagttgctgtcaggcctgggcagcaggcaatatcctggtaccggacatacctgctggcagatggttgttaaatctcacggttggctattcctgcgtggatctgcatatccctaggacaatttatatcttttttggtccttgcttccagcctacctagccaaggattgggagggaaatgaagggcgggaaggaggagtgcatattatggggtccgagtccccaccctgaccacacttttcatccacagctacaaagcacaggccggctgctagaggagcagctgccagagatgatgacggagctcctagccagcgcaagagataagatgctgtgcccctcagagtccatgctaacccggtccctgctcctggaggtcatcgagctccacgccaacagctggaaccctctgacgccccccatcacgcagtactacaacaggaccatccagaaactgacagcctgacagcccagccgagggggcctggcaggcagcccgtgggcagctggggccctagtgcacagggccagatggacaggcgcaaggacaggggtggccctggcgggaaagagaactgagcagggaggcaggtagccacggtggccggtctggagccagcggagaaggaggagattggatccctcagaagggctccccgtgcagccccacccccacccacccccaagcctgcgcatgtggcagctcacaccaagggaaagcatgtctctttgtcctggtggtcacccgtccttgctctcttctcctcggctccagtcctcnnnnnnnnnnnnnnnnnnnnnnnnnnnnnnnnnnnnnnnnnnnnnnnnnnnnnnnnnnnnnnnnnnnnnnnnnnnnnnnnnnnnnnnnnnnnnnnnnnnnnnnnnnnnnnnnnnnnnnnnnnnnnnnnnnnnnnnnnnnnnnnnnnnnnnnnnnnnnnnnnnnnnnnnnntctcctcactgtctacagctgcctctctgcctcccacacctctggccaccgcttgggtcagccaggactgctgaaggctgaaaaagtgggtcgagacagctctcattgttcccacgtgctgtcagccacggtcgccaactggcagcaggcagcgggcagcagatgtctgggaggacaaaggcaggcacggtccccaccagccgcccataattgatggcctttgtcagccccagcggagctggagagaggcttttttttctcctctaacctccgtgctccaccctccaaccctcggcctccagccccagggcccactgctccccctggcagagaagggagagccagggctcacagctcagcgtgaacccttttattttgtttttcaaaactcagtggctttgaagtctcttttcctcaatgaaaatgccctagattttgagatcacatcgttctcccctcaaggatcccctgattagtgggagactaagacctgccccccctccccaaagaatctagccactagcagcttgccagtagccagctagtaattggaaacttctgctccaatgggggtccccactggaatcctgtgttcctgggcccctgtcctgcagtgcctctgttctgtccactgctagcttccaaagggctggactgactgccttaggacctgccctggctcctgttactggcaaacggggccagaaacgaggctggcaaattacaaccaaatgcaggtcttgttccgagcaactgttgagggaagagcccactgctgactccacagatcttggagcctccttcatgatcccatgccgcatcccaggcaagacccacaagccctacctccaaggctgctggggagagggggaatcattgggtcctgactgggacggtttggtaggcagccagatagacaatgaagttcttcaggctagaaacaaagtcctggtttcttgggaggctctggtcccagggagcaaccacttctataaaggctagggaggaggaggaggccatcagagaggctggtcttactgggatgactggtggctcctccccctcatctctggggagctggaacccacactttgatgacaccccccccagaacatgtgtccaagcccatgcactggacctgggcatacctagaccatggtggaggctctaaaccagtggttctcaacctgtgggtcacgacccctgtaggggactcgaatgaccctttcacaagggtcacacatcagatatcctgtgtatccgatatttacctgacgattcataacggtagcaaaaattgacaattacggagtagcaacaaaaataattttgtggttggggttcaccactgcatgaggaagattaaagggttgcagcatcagggaggttgagaaccactgctctgtaggcctcctggttgaattcaggctgtctcgagtaaggatggtttctcctaactgtcccaagtctagaagagtagaaagcgatcagggtggaggagggagagttcccgagttctctgtggctgtctccaactcaagtgttcaggtcccaagatggggcctctgaagagggctgctgagaaaaaggaataggggtcacggccaccccagctttgatctctttccttttcttctcctccttcctagccttcttttctctgctgcttgctgccttgtctcccatcccagcccttaggctgagcctggagcccagggacacgataagccccacaggaggtgtggagggaagagcagggcaggtggagtagccagagaagacaccagggagatcctgctcctgtggacttgggcagcccaggctcacaggcacctgctccctgcatcctctggggccatggtgtgcttacatgggctgcttcccaggtgtgagcgtgtgagtgagtgagtgtgtgtgtgtgtgtgtgtgtgtgtgtgtgtgtgtgtgtgtgtgtgcatttgcatctgctaagaatgaagcaggaccttgaggaaggaagagactgatggtagggactcaagccacagtagagaggtctcctagactcctcattgggctcacagagtaggctccacacagtggcttccaaacactgtgtagaagagctagtgtcccctaaagaggcagagaccatggctttgtgggcaccatgggcctaattcagctccttcttgatgtcctgttggagggtcttgcttcaagagcatgccctcgtagggccttgaggaccagtgtgaagatgcaagatataaatatgtatacatatataaatatatttttaattacatgttgtgtcccagtggctccagacttgcagtttgcctagcgtattccattgtttgaaactacttcctggtccatcctgatatgacactttccagctgtctgtctgtctgtcttaaacgcagatctctgctactttttcaaacatggaaagaaaccctttttattattatcattattattattttattttttaaagagacaacagtaaagcctaaaatctaaaaggctgagcaccttcctgtgggggataactcaagcaggaagtaggggacttgcaggcacccacagaccctgactccccgggacagagcctctcctgctgcgggaggaacggcctatcaaagcctgcctctgatgaatgaacaggaggcaaagcctctctcaaacttgtgttgtcctgtctggccatgatgctctgatattgagcctttttaggctccgcccacctgtcaggacaagttggtccttgttttccactcaagtggcctgctggtcactgccctcctcatgaactggccgtattgcctaagctctgggaccacagctcctgtcgggctcttgaactcccctggacaaccaaccccttccaccaaccacggggaacctcttcccccacccccaaaaaaaccatcttcacctgggcatcgttcctcatccagtctgtaaacctttacagtttgcggatcatcttgtccatttgtgtacatgtaaatgttgacccaattggtatttattctaatttttattgtattttattttattctgtctgagggtgggggatgggaagtacaccactggtggcaaccagggcagagctgcagggatgcagcccaggaagcaagagaagcacctccctggggccactctagatggcagcctgtcagtacccacaccctgggctgttatctggaattggaagccggacagtgttcgtcatcccatacacacaggcctgcccgtggcatgatgtccctcagctgcctggcaccatgttgggaaacctctgactggctcttcgaggaggtgggttggagagactagaattctcctctgctcagggcactggccccagaagatctatctggagcctcactgagccagctgggagcctgacaacaggacctacctccctggagcagggtctggagattgccgccaaagctatgggccaaccctgctcgcgccgaccccttccatctacccgtatatcctgcttcccagctgaacccaaactacaagtgggtttaaaaaaaataaataaacgataccaaaaaaaaaaaaaaaaaaaccaaaagtatgctgagtctttcttctctgtgttgagctcagcagtggaatgctttccccaagcctcagctggtacaggcaggagtctccgaagagcccagcccaggctatgtgctgggtgaccagagaatcttcatctctcccctggctgctgtccagggcaagagcagactctagggcaggaggaggttgggaaagggctcatgcaagataagtgggcaaaggaatgagcctgctgtctctaaaagctgggctctgaggccaagtcagggtggtggaatttcctaaagaaaatggcttttgtgatagctttggcttgttacagatttacccagtccccagacctacccatagcatttggcaatgactgctaagaagcccaagactctggctggcaaagtctcggccacaagtattggccagtattggttcagtctcaggcagtcaaagtccgaaatcgagtccgaaatgagccccacgaggtgtacatgatagtgcaccctcgtttcagtttcttctgtggagaagcgggaacactacctcttagtaacaacaccttgtccttaggtgggcacagccttagcctgagagggcatgtggagattcagccattgcttggaactgagtctgattacctccacaaactgcctctggataaccaaaccgacacacaacttggatagaagaaagtgatgacatcattaaatggctgaaatctttgtcacgccaatatacaaaaattcaaaggagtaggtgcagcagcgagggggcaaaaggaaagtgtttgaagataactctcagggagaaacaagagtttatacctgaatccccacccaaagagacgattccgggtgagttagtccctcttcgaagggtatagattactgagtccccgtgcagcctgtcatccaaatatgagtgtttcatcccgcacttcaccctcatctctgctatatgagtcctccgtcttgtaaagagcaggctacatttgtcctagctctatagaaaggcaaaagaggaatgcttcatttgaaatgatcatctagagcatgccacagaccaaaaaaagccttttgagtaccaaaacaaaggttgggaacagaatgggagccaagagaagggatggctgggcgaggagacagtggttctgccccaggttcatgctctcagttggctcagtaagtaggcagacaaatggtatttgaggtgggctaagagtaagagttttaactttatggtgtgtgtgtatgagtttttgcctgcggagtatacgtgccacatgtgttcctggtacctgtgggagtcagaagaaggcatcagctcttctggaactggagttctggatggttgtgagccacatgtgtgtgctgggaactgaaccttggtcctttacaagagcaacaagtactcttaactgccaagccatctctccagcctcttgtttctgttttgttttgttttgttttttggtttttttttttttttgtcatctgtgcacacagatgtgtatctataggtgtgtgtaggtgtgtgggtgtgtgtaagtgttgcatacgtctgtgtatctacgtgtgtgtttgtgtgtgcttgctacattgcagtggggggagcttcgtgggggagcaggtaagtcactcttatccccctatgctgcagctcaagtctttttaaaagtctttatttattaaagataaaatcatctgggcagtggtggtgcacacctttagtcccagcacttgggaggcagaggcaggtggatttctgagttcgaggccagcctggtctacagagtgagttccaggacagccagggctacacagagaaaccctgtctccaaacaaacaaacaaacaaacaaacaagataagctaaaggatagttctgtggagtcttccctttacaaaggttctgggactccagctcaggttgccagggttacagcagcagcatcttttccccctgagctgtcttgccagccctgctctgactttgttatggtactgaatatggaacccaaggcctcatgaagccttagcactgagctggactccatgcgggctaagtggttctgactcccattttacagacaagccaagggccaacaacgcaagggccagatccagccaagtgccttttaccctagccctgaaagctggcggccatcattctgccccaccccgtgtcccctgcattggccagtctatcagacaaaggggcagccagctgcctgctaagaggggaacagagcagctctccaacttcgctcctgctgtggagaccagggcatctaggctttctgcatgggtgtgggaggaacctaccaaagtttgagttctttgtacagtgtgtcccgctgggtcccagtttgcaaagacagaagataagaaagtccctgtggggtgacacttcaagggccaggccaataaacaaattgctagaaactttctctaactgctgatacaggacacacccacacagtgtaacttccagaaccttgaccttagagaacctcttttctcacttaagggtagtgggtatgtcaagccttgattggggtgccagagggaaggggttgagagccactatctgcgccccttggagcacagcataatgttcaccatgaagaccagtgatgatcttgtagcattgacacccgtagtgggtcttgtagccatactccaagctgcggtgctgggtttgccactgtggctgacatgtggtggccagcacattcagagtgggggagggtccagtaagccacttgagttcaatagaatacataccctgattcaagattgtttatgacactcatgggccctaagcacttttactttcctaagcctgccactctcgtgcgtgtgtgtgtgtgtgtgtgtgtgtgtgtgtgtgtgtacactcgatttcatagttttcatagctatattagtatagagacatcaataattattaaacattttctttaacctaaacattaattaaaagaaatcctgttgtagaccccaagatactgtaacaaagcatcccagaactagatggcttatgaacaacaagcagattatttctggctgttctgaaagctggcagtctggggcagaggtgtcagcatggcaggctctaggagtgaggacccttctggctgcagactgccaacttctcgttgcatctatgcaggcagaaaaggggttcgcaaagagctggggtgggaggcagcttttgtaagggcactaactccattcctaaggggttcactctgtgacactcccccccccccacaaaggtacacctctgaatgttacccgactagggcttagaattccaacatgaatttagagctagtcatttgttcatagtagcatgctgctcagcctaggcaacctcagccctgtgtaggtatcttccccgagcaaggagtcctgcctttcctggctgcctatttgggttcagggtgactgagggcaaggagggggttaacagggcagctcacagaagcaacccagggtccccacacatgggtctccatctccattagtctctcatttactaagccctcctgtatcctgggcatggtcctgtgcgctcagtcttctgtaattctcaggagcatccagactatgggtatcattggctctggggatggatgactgcagccagaatcccacagctgccccgatgtagagagttctatgtgtggtgatctcagacaccaaactcctgcttctgaggccccttacctcccccacaccccagtgctttcctattttttcctatttctctctccttccccccctccccttgcattggagggctttagggaaatacattcagaaaatgagagctggcagcagagcgtcccttaccacagccatccacccacaagcctagctcaattgctgggtgaccagagcaaggttctgacagtggcatgcccatgatagagagccaatgcctggcttagggcctccggtaatactatagtgcttgcccaatttcattcccagactcagaagaaaggacagcccctccctatcaggtgacaagctagggggaacccccagaacccaggtctgcatgagaaaaatcagcatgctgcatgctgagaactgagaacaagcttctagaacaaccccatgtgtcgccaaaacatcacagagctggattttacagatgctcactcaaatgcacaaaaccttgtacagacttgcttctagatgagccaacggtggtaggctcccacagcagacactcacacctgcacaatgtcaacacaggccacacgggtgtcagtcccactaatcaccgactcaatttggagccacttcggtgaaatgtctaactcagtcttcctgcctcagcctcctaagtgctggggttccacgtgtgcaccgccgccgtgtctggttacaacatttcttcgttaaatgtaggactgtgcactcacagggactatcctgctgaactgggttgaaaggaggtccccagcctgcaattcctgtgctccagcagagtctctaagaactagcgggaggtatcatactcggagttctagaagcttcattcagccctcactattccgttatgatacaagacagccacccgctccaacccctcagttcccagggcacaacagaggctctggtcaggattctcggtgacccaacagaccgctcactcggggccatcaaggtaagtccaaggtgaactaaatgggtgactcaagggctcagggcccaatcagggccaggcacaccctccagagccgtctcagcctagaggaacatagacgtcagtgtcattctgaagaggctgacagaggacaggaaggtgacactataagtacaaaaaaaaaaataaaagtcacttgggtttttcctgggtaacttccgccatgacactcaaggtggtgaatgagcaagctgaaagtcccagggtctgtgtctgtttcactgtcagtgcctcgagggctgcggacggggcagagtttgggtaacactggctggcttgggctcacatttctccatgatgacaaagggacagagctcagcatatttgagtcacagtgactagtggagcagactttcgcttagtgccacctcctgtgccccgagtgccctccaagtcagggttacaagtcccctctggaccaaacagacagtactggcccagaagcaaacccggttcagggatacgaaccttcccacagcctactggagcaattaaaagggaaagaggtggtgagaaacatcaggggattagttaactctccaggtagggagcattttggttggggaagaggatccaggcccaagagtctgtaggttctgatcttcacaccaattagatctctccctcccaggcacctggcattgtgcactgggatctgatcatgcgactaacaaaccttaaactatgaagttttgtttgattggttggttgggtttttttgtttctgggtttgtgtgtgtgtgtgtgttgtttgttttgttttgtttttgttttgagacaggttttctctttgtagtccttcctgtcctggaattcagagtggccttgaactcagagattccccttgcctctgcctcccaagtactgggattaaagaaaggcatgtgccgccaccacccagccttagtttttggtttggtttgactggttgtttggttggttgattggttggttggtttggtttggggtttttggttgtttggttgtttggttgggttttttgattggttggttggttggtttggtttggcttggtttttgattggaatagctccatagaagtgttttgcaccctgatatctgacaccgcatatttcaccctttcttggggtgaaatggcccagggtcatttccaaaacatgaattaatagagttatagggttagccccagagattatcaaggtatgccttctgtgtgtttaattaattattgcacccatgtgccacacttttgcctccgctctcatcctaaagctcttcttaaccactgtcactatcattgttgtggcctgagaaactaagccacttgtcaggactgtttgtctaggagcacacaggccttcactgagggctctggagcattcttagcaaaggttttgcagcaaaggtggacatttctcatcatagtggtggtcatttgaagcaaggtctcactcttagcccatgctgtcctcaaatgccaggtttttctgactcaccttccccaa

SEQ ID NO: 846 - DNA, 2068 bp, Mus musculus
atggagaactcctcagcagcttcagcctcctctgaggcaggaagcagccgctcccaggagatcgaggagctggagcgcttcattgacagctacgtgctggagtaccaggtgcaggggctgctgaccgacaagacagagggtgacggcgagagccagaggacacagtcccatatctcccagtggacggctgactgcagagagcagctggatggtagctgttccttctccagagggcgagccccgccacagcagaatggcaacaaggacaactccctggacatgctgggcacagatatctgggccgccaatacctttgattccttcagtggtgccacctgggacctgcagcctgaaaagctggacttcacccagttccatcggaaggtccgccacacacccaagcagcccctgccacacatcgacagagaagggtgtggaaagggaaagctggaagatggagatggtatcagcctgaatgacattgagaaggtcctcccgacctggcagggctaccatccgatgccccacgaagcagagattgcacataccaagaagttgttccgaaggaggagaaatgaccgaagacggcagcaaagacctccaggagggaacaagccccaacagcatggtgaccatcagccaggcagtgccaaacacaacagggaccaccagaaatcttaccaggggggctcagggccccacccctcggggaggcccacacaccatggctacagccagaaccgacgctggcatcacggcaacatgaaacatccaccgggagacaagggagaagcgggcagccaccgcaacgccaaagagaccgtgaccgttgagaaccccaaacttgaagacggcccaggggacaccggacacagtggccttgagcccccctgcagccctgacactctgaccccagcagcttccgagagaccaacccctcagctgtcaggggggccggaggctgagataaagcataaagacactgttcttcctgagcgtctcagggagcggcccaaaatcaccctgctccagtcttccaaagacaggctgaggcgaaggctgaaggaaaaggaccgggacgaagtggcagtagagacaagcagccctcagccaagcaagatggacaggctgatggaaatccttaacagcatgagaaataacagcagcgacgtggatgccaagctcacctccttcatggaggaggcgcagaactccaccaactctgaggagatgctgggggagatcgtgcggaccatctaccagaaggccgtgtcagaccgcagcttcgccttcacggccgccaagctctgcgacaagatggccctcttcatggtcgaggggaccaagttccggagcctgctcctcaacatgctccagaaggacttcactgtgcgggaggagctgcagcaacaggatgtggagcgctggctgggcttcatcaccttcctgtgtgaggtgttcggcaccatgcggagcagcactggcgagcccttccgagtgctggtgtgccccatctacacgtgcctccgggagctcttgcagtcacaggatgtgaaggaagacgcagtcctctgctgttctatggagctacaaagcacaggccggctgctagaggagcagctgccagagatgatgacggagctcctagccagcgcaagagataagatgctgtgcccctcagagtccatgctaacccggtccctgctcctggaggtcatcgagctccacgccaacagctggaaccctctgacgccccccatcacgcagtactacaacaggaccatccagaaactgacagcctgacagcccagccgagggggcctggcaggcagcccgtgggcagctggggccctagtgcacagggccagatggacaggcgcaaggacaggggtggccctggcgggaaagagaactgagcagggaggcaggtagccacggtggccggtctggagccagcggagaaggaggagattggatccctcagaagggctccccgtgcagccccacccccacccacccccaagcctgcgcatgtggcagctcacaccaagggaaagcatgtctcttt

SEQ ID NO: 847 - protein, 594 aa, Mus musculus
MENSSAASASSEAGSSRSQEIEELERFIDSYVLEYQVQGLLTDKTEGDGESQRTQSHQWTADCREQLDGSCSFSRGRAPPQQNGNKDNSLDMLGTDIWAANTFDSFSGATWDLQPEKLDFTQFHRKVRHTPKQPLPHIDREGCGKGKLEDGDGISLNDIEKVLPTWQGYHPMFAEIAHTKKLFRRRRNDRRRQQRPPGGNKPQQHGDHQPGSAKHNRDHQKSYQGGSGPHPSGRPTHHGYSQNRRWHHGNMKHPPGDKGEAGSHRNAKETVTVENPKLEDGPGDTGHSGLEPPCSPDTLTPAASPTPQLSGGPEAEIKHKDTVLPERLRERPKITLLQSSKDRLRRRLKEKDRDEVAVETSSPQPSKMDRLMEILNSMRNNSSDVDAKLTSFMEEAQNSTNSEEMLGEIVRTIYQKAVSDRSFAFTAAKLCDKMALFMVEGTKFRSLLLNMLQKDFTVREELQQQDVERWLGFITFLCEVFGTMRSSTGEPFRVLVCPIYTCLRELLQSQDVKEDAVLCCSMELQSTGRLLEEQLPEMMTELLASARDKMLCPSESMLTRSLLLEVIELHANSWNPLTPPITQYYNRTIQKLTA

SEQ ID NO: 848 - DNA, 348431 bp, Homo sapiens
  misc_feature (1)...(348431): n = A, C, G or T/U
aacaagcaaacaaataaatggaaaataacaagtattggcaaggaagcagagcaattggaacactcgtgcactgttgtgggaatgtaagatggtgtagccactatggaaaacagtatggtagttcctcaaaaaactaaaagtagaattaccatataatccagcaatttcccttctgggtatatattcaaaagaaatgaaagcgaggactcaaaggggtatttgtagacccacgtttgtaacagcatgattcacaacagtcaaaaagtggaagtgacccaagtgtccatccatgcacaagtgggtaatcaaaacgtggtatatacatgcaatggaatattattcagccttaaaaagaaatgaaattctgacacgtgctacaacagggaataaccttgagggcattatgctaagtgatgtaagccagtcacaaaaggacaaatactgtatgattccacttacatgaggcacttagattagccaaattcatattaacaaaatgtagactagtggtttctaggagctggcgacagaagagaatggagaattgtgttttggtgagcacatagttttagttttgcaagatgaagagttttgttgattaatgctagtgatggaagcataacagtgtgaatttactaatgccaattttaagtgtgcagtaagcatacaattaaatgtttaagatggtacattttatgtcatgtgtattttaccattttttttaataaaaagatttttactattttaaaattataaaataaccaccatgattaggagttttctatacctaggaaatgggaacacatccagtggtagaagattgtagggaatggagaagtgacagtgtggccaacccagaatgctctttagcagaactgaatgcctgtcatagctgacagatgagccactcagaacatgcttgcatttgtcaatgatccctccagctgactccacagtcgactggtttcacaaagcataacactggttgtgatttgtgtctgggtaaccacagcttccagagatgggccctgtccaagaagctggtattcaaaaattacaactcaattgataggagaagagttcactggtactggcttagtaattaaattgcgaggtgattattagtctgctcaggcaaaaagatcacatgtgagtactttaagtagcctaagactaaaaaactcctcccagaaaaaaaaaaaacaaacctgtaactaaattcataccattttctgccaattatagatgccctccagtgactttaaggttgccacagcaacatgcccactgaaaggttgtcttagtccattttgtgcttctataacagaatacctgagactgggtaatttataaagagaagatatgtatttcttacctttctggaggctgaaagtctaaggtataggggcccacatcttgcaaggaccttcttgctgtgtcatcccatagtggaaggtggaaggacaagacagcacacatgagcaagagatcaaactcacagactgaagccctttcataatcagcattaatccattacggggtggagccatcatgacctaaacacctcctagtaggccctgccccccaacgctgttgcattagggattaagttcccaacacatgctttttgttaaaaagaaatgtgttaaataatgcattgggacatattcactatagcatagggcatgattgctaagtcctgaaatatatggatatagcaaagagagaatgtttcacatcttatctctgtgtcaagccaaaattttcttctaggggtaggacaggtgaactgtcaccaggcagctctcctctcttctgtggcgcaatctgaggtcccaagctggcttgccacctctgccactgccccacagggagcacagcagcccggcatttcccctacactgctcccttcccctgggtggtctcccagtccacataagctaataggcatcctcccttgtttttctgaaaacctcctctgccacctctcccaagcagggttccctgaccaagtggcagcttggtgctttctagagcagatcccattcaatcacctagctctgcacaaaataaattcaaaggcttcacacaccctttgcctttgttcaagtcccagacttgctgaaaatcagctgactcctgtgaaggtgataatggggagtaatgctgtgaaccacactgatactgaagacacattccagaaagctgctgatgaggcaaaatttggtctatcaggtctgacattgcatgtaccagacgtgctgctacttaaagaaatgatggctacttcttttgtaaaagggataaccatcttacaaagtgtcttttgtgtaaatttctatttttatatattagtaggtacattttagaatttaaaaagctgtcttgagtcatttctggaaagagtggagtataaacaaatctgataattttgccaaaacggaaaaagaggtggggtgagggtagtggatctgcatgtgagaaagggacagaatgacagctcatgaagaaccatgagaacagatcctgattctgcaagttctactgaaccctcagaggccctgctgaagatgaggatgaggattactgggattagggcacaagccagtgttggatctcacagtctgggtcaggctgggagtggctcccacagtctgggccatactctactgtctacccgcattataactgaaaaacaaaatctaatctcaccctcttgagtcatagaataaagtcctaattggtcaaaacttttgttcctggtcccacacagcctatcacttgggtaacagcaaaaataataacaataataaccaaaaaataaaacctggtgttactataagtccttactatgtgtgaaatgccttgtatacatcatctcctttaagccttataatgacttactgagatatgttctattatttctctcttttgtagaggaaatggaagcttagagttgcccaaggtcaagtggtgataaaaggggaaggcaggatgcaaatcctggtgtctgcctcctgagtccagtcttgaaccaatgacacacaactaactttctggacttcgtgcctcctcctccccattgctcagcccctccccgatgtgagttcccacttctaagctcctgcctgcctatcactgggaaagccccctttccagccctggtcccatcctatcacactcatgcctggctcggttccacttctcccttgaatgtctctctgctgctctagcttacaagggttgccttttccctgaacaatcactctgtctatattacacatatggcacaccttggattttaatattttactgccatttctgtttaaaatgtgtatgtcatctgaactaaactgtgaggttctgtaagcctaaattaatgcccacttttgtgtgtgctggtcattcatattcaactttgaacaaatgcgttatatataataaatactagggtataaaggatcatttaaataattttttaatgttatctataaagagtttttaataacagaaaatatgtgtttaattttattacatgagaaaagcaacatgcaaacatgcataagcaatgccatctcagctattataattccacatgataaatcacgtgtagaaaatttgaaacataaaatatacagggtaataaatagggcaagaaaggcatggaacctcattcagatttagtgactgcatcttcattatttcctgcaatcattttcttattaacaaattagagaatgtgacaaacactcaaaatccagaatgtagtatgtggaccccctactatgtatgtctcaaaatgagccaccagcatgtctgaagaaaatattgtgatatttactgaaatttatttttatgtcaaaaataggcaaaaagagtaaacttccctaagcgcaaaggatcttttgaatcattaacataaatgaacacatacacatctctgaagtctcaatttaaaagaaagaacactttattataaatgcaccattgaggaagaatgatgtttccaaaatttcctgcagctggagtacaggtgctcaccagggactcagagaaggtagatcctaatgtcttgagatgaggggcgtagttaactcactggctctgaggcccacagctctgggtagaccaccacctacccactggctgcgtgccccttggtaagctacttcaccccttccggtctcagtttgttcccctgtaaaagttgctttgccaactaagtgagacaaagcacacaaaaaaagtttcgcttgttgctctgtaaatagtaatagctcaattaatatagtagctattgttctttgaaaggggacttagagatcctggaaggctcaagggcaattattttgcagatatttcagaacaagacttgagcagacaggatttataaactgactgaagagggagacacctgggatagaaaacggaagggcatcttcagcagggggacagtcccagctagagggatcatattggcctaactcctctctctgcacttcctgtctttcaggctgttctagatgtggctcttcaaactacaaagatcggaagtcactcaacctagcgcaaattaaaggggattactacaagaatatggagtgtattaggctgttcttgcattgctataaagaaatatctaaggctaagtgatttataagaaaagaggtttaattggcttatgattctgcaggatgtacaggaagcataacactgacatctgcttctggggaggcctcaggaagttttactcatggtgcaaggtgaaatgagagctttcaagtaacatggtgaaaggagaagcgagagagagagagagagagagagagacagaggtggggaggtgccacatacttttgaatgaccagatctcacatgaactcactcactattgtgaagatagcaccaacggaatggtgctaaaccattcatgagaaatccacctccatgatccaaccacgtcccaccaggccccacctccaacattgaggattacaattccacatgagattcagagggaacacagatccaaatgatatcgcagaggtatatggagtccaagagaggcatagtgagggagaactgaaaaggtaaggaactgaggctactctaaacatgtctctttccctctccctcctctttcccccctccactcacttcttctgcttacttatcttgcactcgacccacctaaaacacaagccttgacctgagcagccatcaccaatgagcagagagaggtttctcagcctcttacttcagattcttacaagaggaattctgattggctcagttcctctgatggagccacatccactcaagtccagcctagcccaagatcccatagatcgggtgtatacctgtggtgtgatcagcactgcctgcccctcccatttttttagagtgtagactggcaaacaaggaaacttgtctcttgcagagatgtggggtgtatctttgtccaggccttcaccatgaacaaggctgtggtgctcacgccaccgacttaggaggtctgaccttgaactctgggagacttgaggaatgtctgatgactcacaggctgacattgaatcagtccatgtccttaaatcttgcaaaaggaaatctgcttattttatattccctcatggacttcagggctttgtttaacaaatattacaaacctttcctgctctgctggaattaaacagcttaaaattcatccttttggctacttaattttcttgcttcttttgccagtgagattataacattcttgaagggagaatttcaggtgtggtgaagatcttagagatcattgaggccaaccttctcattttacaggtgtggaaactgaggcccagagacaggaaacgtcacacagcaggagaggggcaggtgggacccgggatcccgtttcacacactgtgttccccagagtaccttgccatgtcttaggcacagcattgtcccaacaaatattcaattgctttatttcatattctgcttttgcttttctcaagctcattgttctctattcacatcccttctctaccaccgacttcaatcttaggggatcactttgcatgtgcctttcaggtgttggtctttggggttgtgtagtggaaggtgagatgaggcatgggtgaaatttcacctggttctatcaagctgttatctctccaggccaacaccacggtaacagagcgtagacactagactaccaacttccttccttctgcactgtcagtggcctccaaactgcatgatgaagccactctctagctcccacagtaagtcactagttctgcaatgcctcctgggccaacaccgcataacaggaattttggccactgctgaccttctcccagtgggaagtaacaagtggatgtagccccaccttcctcccagaagccttctctgatccttgtagccgactgggaactcttagttcatttgacatcactctcacacagtggagcgcttcattcattttcctgttatctgctgggcatcagcctggtctcagctcctgaaggtaggtagcttctctcccccagcacctacctaggctcccaccaggccttcagtcaatgtgtggactgaccagtaacttttccctggaacagctatggctacgggggtgagtggagagaagtcatggcaagaaaggagaactagtactttttgctattatcttaggcaagtgtgaatgaggagaagcaactccttaaaacaaacagaaacattctgacttttcatttctaggcagacagggaaactcctggccactcaaaatcggtcacaattaaaccaatgctagcatcatttgcttcaggaatctccagttccttcactctgcacccattagctcttccgacccaagcctgcaggttgggcatgaaatcaatcccagagcagagaaggaacaacagacaacgggccacataagccccaggcctcccacctgggggaactctggtctgaggcatctacaaggccttcccctcaaagatccccattccagcctgaaatgcccatcatcagaggccactgaagagagcgctcaataagaagacaaaagtgtcagagttagaggagagaatcagaagaatatcttatatgttaatgacagtttattagactggaggtagagcccagagccaggcactgaggatgtggaaaacaggagggaagtttgggtgggcaggcagcagcaatgcaaagccccaggcactgcccagaggaggcagcattaggtggggcagcagggtagggagcagaggagcatgaagaactttagctgatgtgggttaagagagctaggccaggagcaggggaaggttagaattgggtccaggttccttgaagacaaacctaactgatttcacatattaagatgtgtcaccctcaggaatccttcctgcactactagctctgctggtgtgagtctgcagaaagaaaaattcagggatcatttttgagggccagaaagactcaggacaagaaagggcatcagccatctttgagcactttccatgtgacacagtcagcataaacccacgatcaccactggttctcacaaggccaagaaaagttgttgagtaagtggcccaaggtcatcccttatgaatgttaagtaagctgcccaaggtcacagagccaggacgtatcatgcctgggattcaaacccaggggtcacactgacaccagagcctgtggttcccactgccccctcaccctaggtgcataccccaaacggaggtgtgtgctctccgtggaagcttcacgttccacatgttgctcaacctctagcctctcctcacctctgagggtgcgatttaagcaaaagcaaagccaaaacccagacaattttattcttatttcctttgcaggtggcatgcctgtcacacaatatgtaaaaaccaacaatgacaacagggtaagtaaatgggaatttgctgaatgtgtatattccagtattattatataatattttgtaaacccaggaaattgtccagatgttaaagcatacaaataactcactgctgagccaatgaggcataaatgctaagagggacaaaccaacgggaagagtcaggtgtgcttaaacctgttgctttggagtggacgacggttgcctgccacccagacaactggcctctagtacccactctgtaccgaatcatggctgggcatgagttgcttaactctctgggcctgttgcctccctcctgaagggagggaatgacagccaccatggcctttggtacaagaatcaaatgagttgttctataggatgtgaatgtctatgctgttctgtgtctcaagcccgggagacaagttctccacacaaaacaaaatcccacccatccttcaaggcccatgccactctccatggctaattttttaaattttttgtagagaaggaatcatgctatgttgcccaggctggtcttgagctcctcaggctccaaaactgctgggattgtaggcctgggacctttcgaattagctctcttctctcatctgaagcctttgtaccctttaaccttaatcaggtgcttatcctttcctctctctttgttaaaaatcttagaaattcttgccgggcacggtggctcaagcctgtaattacagcactttaggaagctcaggtggtggatcacgaggtcaggagatggagaccatcctggctaacacagtgaaaccccatctctactaaaaatacaaaaaaaaaaaaaaaaaaaaaaaattggccaggtgtggtggcgggcgcctgaagtcccagctacttgggaggctgaggcaggagaatggcatgaaccagggaggcagagcttgcagtgagccaagatcacgccactgcactccagccagggcaacaaagagagactcagtctccaaaaaaaaaaaaaaagaaaaaaaaacttagaaattctttgctcaagtatcacttcctccaggaagtcttcctgaccctctcccagaccccacccaccctccatccagttggctgctccaggttgtgtggtggggggaatttcacagcactttgtgttaagcgctgacttatcccttgtataatactttcattgactgtagtccctaatactggactgagctccttgagcgcagagactgtgagtcttacctgttttggcattcctagacacacctggtctatggaaagtgctcactaaatgtgaatataaactaatgaataaatgggtttctacagcagtttatactgcatcacacagttcctctaatgaatttctagcccccttccctgttggggcatacagtattttattcagtatttctcctgaaggcctctctgtgccaagctcagttttaaccaaaacattggtgatctggttaagtcattactgaattatccactacgttgaattctcccaaccaccccgtcccagcccttagcttggccgaaggaaaattaattggttgcaaagtgcgtatctaattacaacagccagcccccgacacagagatgctcaaatgttaattataacatatgcatctcaataaccgacggtggcatttagtgcagcattaatcacgccacttgggccccccagtgcatacacaaagctccttttcatctgccattagcacagactttgcactttcggcacggacgttctcatccttaaagcctttcggactctaaaaccaacgtttccctgtaagcctggactgcgcctaagcccccagttctcccaccgcagaggcccccacccagggctgcgccagcgccgtggggtcgctgggcggcgggttttggcgtcgctagactgggctgtcttggcagctaaggcgacatcccgagcgtcctggggccaccctgctctccagggcccgccatcctggaaaagaaaggcgaactacattacccagcaggcctccagccgccctctttcctttcaagtctttgcacgtggccggaggggagggcggggcctgaacgtcactctcctacattctctttccctgtgtcagatcagggatcattttttttccttcctctactccctcccccctacccgcccctccctccctgtttcccttccctccctccctcccctctctgctgggtctgtgcgctggggcgcccgatcccctccgcagctgggacgctccgaactcgaggcaggagtcggctctccggagcctcgtccctcccttccccttccctgcccccttcccccacccccgactcgggcttggcgcggcggccagaggaaccccgaggtgagcatctcctcgcccgtcctcctcttatagtcatctcagcttgctgatcgattcggggacccgggaggagggctgcgtgacgtgggcgtgcttatagataaatccgggaaaaccgccccaaacaatcagcccccttccccccatccctgctcctgggccagcggggtgtccgcacccatctaccatcccctcctccccctcggtggggaactgcactccacagtgtcgccccctccctgggtttgtcccattccctgccgggttccccgccccgcggggtgtcgtggccctggagctccggcgccaaggggggctcttgggggacgcacggctggagcccggctcgctttggagctgcgcggtgtagccgctgtcatgtgccgggttccgacctgggaggaggaaaagagcgagcgcgattcctctcccttttgttttgaagcccgcatttgctgcatcgagcagttggtttagtatcagccaaacttgcagctgttcagaccgcgctccgccgaggtagggagcccgtctcggggtggcgtttgggggccgggggctgcggcactcggggctgcgggagggaccccgagagtgtgtcgccacgccgcccctcccttccccggtgactgattgtgtctgtggcagcgggcgtgtgtgagtgtgcgcgcccgtccccgcgggctcggggatgtctgtggatggctgtcgtctagacagggcgcagccccctccctgcgtccccggtgagcccgcgggccgcggggggagcgggggatgggagcagaggaagaaaccaaatcggtggacccgttgcggtctcccctttggttattcccaacggttgtggttctgttggctttttttattattcctgtcgctgcggtgcaatcgggcctggggaatagatacgcccggcggagaggggttcacttgacaggctctgaaaagccacctctgggtggcgagtgacccgagaggccgtggggtgggctccggctcgggttcatcaggacgacgagcaggtaactgtcccgggcgccggtcatgggggagggcgggcgggggggcgatggcttgggctgcggcgaaggtctggggcctcggagggccgcgtgccggtgcctggatgtggccggagggggcgtccgggacaccgcgcgcctgagccgagtgtttctctattgatggtaaaagacaatcgggaggggggtggtccgagcccgttatctgggcggcgttggctctgtttggttccgcggagttttcagggttggggctggggggggtgtgagcaccgcggggtgtgcggcgtgtagaggggagggctgactggcggcgccgcgtgcgtctccaccccgaggagtgaggcgtcgcctcccccgcccggctgtttgtgtgtacacacggctccggtgtgtgtggggggcggggaccgcagaccgcggcgtagtggggacaagcgtgggccccgatcctccgcgcgacctgtcccgccagccccctccttgtctaagtcggggtcgtgtgtccccgcgcgcgcgcgcccgagttacttggagaggggaccgtgcggctgtgggccggggaagaccgtagggtcgcgtgtgctggtcttcggtgcaggagtcccaggtccgctgtgcggccggagtcacacagcccctccctccgcgtccgcgacgccccgtgacccggcagactgggggtccacccggcggcgcggggggttggtttggctgcgccgcccccagtccacgctggggtgaccccgcaccgaggcgttctatgggtgtgcgtgcccgcgctcgccgccgctgccttcgcagaccggggagagagtcagcgactgccaaccgcagccccggctcttcagtctggggacagtgggagcccaagcccagcgcgccccagcccggcccaggccgccgcccgcccggcgctgtgtctctgcggcccgaggattatcccccagtccaggggcccgcgcgaccaaggaggaagccgctggagccgccggctcggccgcggctagagcctccgtagggcgaaagtgacacagcgcgagagagcgccgccgctgctggagccagggccgagaggaaggagccgcccagagcgcagggaggggccgccggctgtccgttcccagttcctcctgcccagggcccgatctgggctgaaaacctcaggaatccaggctcctagcaggctcgggctgcgcgaggagatggcctggctttcaagaaaacccaattatacgtgaacagaatgcaccgaacagacgctagaggatggccaggacacgctcaggttgtctggggaaactcctgagtgtttgacacaggattcgatttacacacagatcacctcatctgtgtcaagtatctgtcctggataatggatgctcagaggcagcaattttgtaacacattctagggcacagtgtcatcagtgattaacagcttgctagaataataatatgtttgtatgaccttacagggcaggttttcttcccccagaacctcccccctcccccgccagatatcatagcatttattaagagggtcctgtgaggtaggagagtattagccccattttacggatgaacacactgaggctcaaaaatgtggcttgcataaggcctctgggtgggggaagggccacattcccccttttctcagcttatggcatttaattaatagtggccactttttttctgagtatggattcttgacacctcaggaaatactgaagctaaaaaatagagtatattatgctgacacatattctttctcaaaacactcttgatttgttaaccattcctaatgagagcagccactaaagaacggaagtctgcattgctgttattaccacgcatttaataatttgctgttggtgaatggatagcagctgtgatacatccagtttctaccagaatcatatgtgcatataataaatgtatatggtatgcctgttcatgtaacacttacctgtgtttgtatggctgtgttcattgagtctttattgaattcaaggagcaaagaacttatacatgcctgcatggatttctcagaattcatgcatgtgaaggctgtcagacagcctggagggttattaagtttagccaactaatcaattaattaaccattcactcaatatgtactgggcacctacatgtttgtgtatctagaagtgcatacaaagaaaacttaacaaatgttaattaagtccagcaaatgtttatgaagcaccagcctcacttaggccagatactctgcttctctacaaagatagtagagcagagatagttaagttgcaatgcaataacacagcctacaggagggaacaaatcataaatattttagagcagtcaccctggaacttagtttcacatatgttggtttcaaggggcccaagatgccagttcttattctagagcaaatgcagaaggaagcgatggggaaaaaacaccttgatagccttgttaccctgaacttcaggctgtttgcaacctcccgggagggcccagaggtatgttcttctgtggaagttaggcagctgatggaaattaccctgaagccaaccaacaggtttctggcgacacggagctaaggagatgttctccgtggtcccgccccagctcagatgtgctgtgactcagggacaggctgtggctttggtcaaggtctcactcaggccctgcctgggtgtaggagtttctgccttacaggtctgtgtaggtgtgttaatacaagtctgctttttatctaatcccaaactcaccgtctggtcccagatattgtcctctaatttcatttctgttttgggctccattgcccttgttttaaggttatgttgtttgcagctcaggtcatgaaggaggaggcaggagatgggtggttaggttggagagagaatcctgagcccagatagagaacaggaggtacaaacatgcaggcaaattgcagtttctgagaattctccacacgtggtggcatttctgcataacttacctgataacacagccccatttgatgtccttggcttggcagggggagggggcgtctacctctgggcctcactgctgactcaccggcaccctgagctcagctgcttcctttcaggtttgggttttcttttgcccctgcctcccgctgtgtgcggtttaatttagaaccttgctataatggtggccttctccctgtgttagcaccgtgctctcagcatgcctctgactttggaattaaggccagagctgtggttcacaacggggtgagaacagacacatccttggatctccggcacccagagctggggaggactttgaagatgatctgatcttcacgtgaagacctgaagcctagggaagtggaatgacttgcctaaggtcatggtgagcccttagcagagtgggtaaaaaatcctggaatttgagatttcatccaatcttctttctatgtaccgtaatgctttctggaaaaaagttaggttcttcccaaagagtgagaactctttatcttcttctctcctgtcttctggttctgggaagggctctgaaattcatttgacttctctttccttcacaactggcccttcctgccttatcttcatctttggcattcatgagcaaatgaaggtctgtatttgggaaatatagggtgtcttggtgtcctacagtgctcttaagcttggtctgtggctttctggccctgaggcagggtcctcaggaaccttttggaagtgtttgcaaagctgggatgcgtgtgtacttttctaggaagagaatctacagatttcatttgattctcaactgactcaagtaaggacaaaactactggtagggagaaggacagaaaggttggatagtggttggttgacactggggctactttaatacgctgcacttgatttggctttacagtttgcaaactatttcacacaaattatcccatctgccttttataataggtggttatcgttatcagcctgtgaggcagttgttgttatacccattttgcagagcaggaagctgagccttcatggttagtggcatgcccaagtcacgagtaagcagtagagcagggatatgaaccctgacttcagacttcaggtccagtgctcagggctgaggtggcttgctgtctgacatcattatgatgaacagaaagccttgaacttcccagagcttcttaatgcctactgttcactcatattcggccacagagccagacccaaatgctcacttacccaaggggtaggggagataaagtatgggaggcagttaccatagcaacgatctgtagagtggagccagtttgggatggtttcatggatgaggtgaatttgggagtaggcctgggtaatggtggaggaggttttaggctggggcaatggcccaaaaatggttagggggcaactaggtgcttggggtgggtagaacagacctaagaggtttacttgatcatcctgcagtcggtgcgagcttcacagtagttgtcgggctgcttttctatgcctgtctttgtgctaggccctggggctatgacagtgaacaggtacagccccctgccttcaagcagccagctttctagtgggagagacagatgcataaacagttccattcaacgtcatgtgggaagtctaggtagagagaagcccaaggcccttacagcggcacagacaaggggcagccacctgctccggcctcagatgtcagggagggcttcctaaaggagacggctcaggagctgaatcttaatggatgaaaaggaactggccaggaaaggagatgggagacgggcattcagggagaaggcatggcgtgcgcagggtgtggaggcatgaggctgcctgggtgtaggaaggaaccgcaagcagtgaggtcaaatgcaaaggcggagatgcagacagcgctcagagtggaggagctttgtaagcctggtttcagaccttggcttttagcctgcaggtaaggcatagaggaaggactttaatcagagaggtgtacagccttgcttggatcggaagggaacaggactgggagccaggcggccatgggactggtgaggcagtaacaggctctccacggcatccaggtcatagggggtgagacctggaacaagggccatgcatctaaggatggaccaaaggtcatacattaaaattagttgggagtaaagtccgcagtgattacttagacttgggggataagggaatcatctcagtggctcccaggtttgtggcctcactgactagatggacggcagctcttaactcaggtgcgaacttctggttgctggagcagggtctgctggggttggggtgggagggaagatcatggtgagttcagtgctccggtattgaattggaattgctggtaggatagtggggtggtgctgccctacagacaatgcactgtgcaagctagaggctgcagaagtgtgtgcccaagctgagccctgggagcggggaagcattggccactgagcgtaaccacggtgagggctgctgtagacaatgagagcagacctcttcctcccattgtcagataatcctttgtcatgccggccgctgtcgtcagggaagccaggcggggatgctgtgtcatgctggaggcccagctggcagaatccagcgacagccaagagcgtgtttcagctggaagcattagagtgagttaggggagaggcatttcgctttttaacatccacagtgagcagagccctgtcccagccccttggagtgtacagagtggggaagccctggaacctgcttccaggagcaggtagttttgttggggagagaagatatgaacatatgaagccactaaaaagctgtaacaaccccagggaagagtggaatgcaacttaaatagagtgttgcagatccctctcttcctgccatacttcatttttatagagctgatgtgttttaggcaaacgtccagtctttgcatgtttgaattctcagaaccgacaatagtgcctggcacattgtaagtgtgtgttcagtctatgtttgtggatctgcagggatgtacccagagttagtcgtctggggtgggaggtcagtcagggaaggtttccataagcacgtccaaaaggggcatcccaagactgatttagaatacttttagtaccacagtggagtaaaaatcttgaaaaccttccaatgacagagcacctagaaaggctgtgtaagctgtagctagcgtcctttcaaagaagagctaagctcatggaatgtaagggaaatccccagggatctcaggcagtgtggacggtgagctccagctgaggctcgtctaggcctgggggttgggagaggtgttgaggggtgcttcctggcctcaaagcccaagggtttgagtcgtgactgcatctcctccgagactagagatgataccaggaatcaagagccctgcctaaaacaggacctggtaaaagtttgcatgctgggagaaaggatggactagacagcagcccgtccgcatgggggatggaaagtgggtgtgctgctttttgtcttgacctggatgtgaggtggagaaaaatcttccctagaaatgtgagacctcaggcctgttagagctttgaatgtccactacacatgtggtccaggaggccctcaagagagaaattagcatgtaaagacttgggggccagtgtcttcctgactgtgagctctagggcatcaggggcctggggagagtctggggctctttgccctttgctgacttaaatctccaccttgggagatgctttgcgatcagggcagggtaagtgagggaggagagagaagagaaagggcagaggtgcccctcggtaggaaccttttaaaagggccttggagacagctgcacaactcggggaggcatgtgcaggatggcagagaaggacagttccatccaagccttcatctcttaggaaaaaacttcagatgagccccgtctaggaagcccagaacattctccctactgcatactcaggtcaggttcttacagataaggtttctttccagggtccccttaagggtgccctgtgcagattgcagttgctactggtcctctagactgggcactacattgtcttcccatgctcagagtctttagttcctacagtttcaaactcaggagacatcttagaggtcatctggtcaaccctccacctggtgtgggaatcctgactgcagcagcgcttggttccaatgtgcttgctgcttgtggccgggagtttattgccttggaggcagcgccttcccttatgttatagctggaaaggccttgtactgagctctggccaccctcctcgctggccattttcacccatggcccctgcagctgttgtgagagatggtttctagacctttcaccatcctgcttgcttctgctggaagggcctccatttgtcaagctgagattctgtgagaatccagccaacttctgtcctaacttacttcacacagaggcagcttttgaagatagatgtgagggtagctgagccggctgcataggcgcagtctgtgatgggggagttctgagaagctttggctcggtgcttttcggatgatcatgagagaggcagcagcacctgctgcaagttccttcctccgacgcccagaatacatttcagcttataagtaagtaacttgggaatcccatgcagggagctgtgtggaatttattgagtgcagggagtttattgagtgcctgttaaatgccaggcacaatgctgggcgctctctgtgtgcctcgctaaatgaaagtaacctctctgagggagacagagaggcagagatatggtaatgcctaactgtagttatgacaattgagccctgaagggattcagaaagaatgtgtgtggttccatccagagtgggtggagctgacacattccccatgctgttcccttatagggccttcccctggggtaggcagtatcatgatctcaccagtagctgggaacacacaggcctgtcccacactcttggggcatttgctgagatacttacacgtttgaaccatgagatcaagaaagtgacctgctagagaattcacatcttggcatgtcaccaaacaggctggtgtttacaagcaaagtattttttacagcatgcggtttatctgtctccggtatctacctacagtaccctgggcactctcaggaagcaaaatgtctttctgttcctccatctccttgatgcttggcatctgtgtgggtcacatattcagcagattgggtaataaagagcatgcgttgcctttgcagcaaggttgcatcagatggctggacgtgcctggatgtgctctgccactggcatgaaggaccctgtgcagacaaggccaatagtgaaggtcagggattccaagaaagcacccagtttctcctcttctccctctaaaaatggtttcttctgcccacattctattgatttgccttaatccttttagctgttaacctttgcctcagtttagtggacacacatggtatctgcagtgggtctggctctaggagtgaggtgagatgaattgaggtaagcctggcagggtccctgctgcccatctgcccatcttgctggggaagacagaatagccttgcgctagtgtaaggtggtaagtatggggtcaggagaatgaaaagggtgccaaggcagccagaagtcggatgactgtgaattttttttttttccaatggataatcatgctgggacacagatataaactgaggttgtcctgggtaggtgagggcttatggacacatgggccagggagggcgtatgcatgtgggtcatacctgacactattatcagacactgttatcagtcatttatactgcagggtgcacataggggtgatgggggaggtgctcgtgcacaagaggaattggcagctgtttccttcctttgcttagaggacgtaggggaaagcattatctgtggggactgaactcagaattcagatggggctcagtttacagccacagggttctatcttatatctcaccatgatctcagtttggggattggggtggaagtatggacagatgaaaaccatcgggcttgtgggatgttattggctacaggtaaaagaacagtgtactaacgatggctttaaaaacaaggtgtttcaactcagccagaagtctaaaggtaggagctctagggttggttcattcagggagtcagcgatcatttcaaggactctgtctaacctaggctgccatcttcagcacattggcctttgttctcaggccagtccccttatggtcatagcatggctgccactgctccgggcatcatgttctcacataactgcgtccaaaggcaggcaggaaggttagattctccttgtctgtcttaatttgtcaggaagggaagcctttcccagaattcccctgctgaagattctatcaagtctccttgaagagaaacgggtcagtacccatgcctccgctccagtggaggaggagaaagcaagtccctggtgctttcgcctcatctagagcaagaggcaagctgtgtttgcaaggaagtggggaagggagcaatggttggctaagcaaagaggaacatttacttcaccaagtttcaagatgtttttatttattgagggggagttagtgaattagctttacttttttttatatctcaatattgttgaggtttttgtttgtttgtttgtttttttaaaatctcaccccctagttctggcaaccaccaacctggtttatatcactataggtttgccatttctggtaattattacttcttaagccacaggtaatgctggtgcataggatcccaggtgttccatggatgccttttttgtggtcccaggacatgggttctgtggtctgttctcccagcagctcctccactttcccgacactggggccaggtggagaaccccagtaggcagaattgtccagagggagggagcatatgtcactggtggcctaggcagcaggactggaaaggcctgagggcctgaggctccagtgggttggtagaggatggcagtcacctttgcaggcagctgtgggttggggagaggaattggtgctcagctgtggcctgcacattctgcagaatgagttctgttgtccctgctgattgggaagcctggccccagggaatgcagggtgtgggaagatggtggtggatgccaccttcccctccccaaaccactatcccctctatacatacacatgcaaacagcccaggccgtggggctgaccatgcaagctaagagacaaatctgtcccctctgggctcctctccactctgctcaggttgtcactgtgtcctcctccccctcttcccacagcacagtctgtgggttgctagagcacttagcacttcccatcactccctgcctcctcatcattccttggatacttgcctatctgtcccctgggatcatgagcaccttgctactgtcctgggagtcatcagggcatttcctatagggctagggtggtgccggccacagggtccatgcttcatggaaaaaaaagtatttttaaggcaagatacatatttctagaaagggacttgttcatttggttatctgtccagattccaaaccagttccgtgtggcactgcacagtgccctggacgagaacttacggatctctacatgttttcctccctaagaggaagaaaggtaatcaactatcctgttctgggctgaattgtgtcctctcaaaattcatatgctgaagtcctaactccagcgcctcagaactggattggtggccaggcctttaaagaggtaattaaggtaaaatgagatcatgagagtgggccctaatctagtatgactggtgtccttaaaagaagaagaggacacagataagacacagatggggtcaacagtgtgaggatgcaacgagaaggcagccatctgcaagtcaagacggaggccttggaagaagccagccctgccaacaccttgatcttggacttccagtctccagaataaatacatttctgctgatgaagccacccagtctatggtggcctgctatggcagccctagcaaatgaatatggaaggattctcccctgcagcttgtggagggagtgtggccctgctcacaccttggttttggacttctagcccccagaattatgagatcatacatttctgttgctttcagccacctgatttgtggtcctctgttatggcagccatggatactaatacacatgcattgtgtgttatgcttgtgtttaggacttcaccccctaagtgtatttcatctttcagctctgagtgtagttgttattcttctcttttgcagatacacctgaaaagttagcattcctcctgaggtcacacagggaagccaggctagaaacccaggcctgtgtggactctggcctgcaagctgttgcatttgggcagtggggagatgtctgtaaacgcagggattgaacaggtggtctttctcctgaaacctgggtgatccaataataactttctttttcttttttttttttggagacggagtcttactctgtcacccaggctggagtgtagtggcgcgatgtcggctcactgcaagctccgcctcctgggttcacgccattctcctgcctcagcctcccgagtagctgggactacaggcgcccgccaccacgcccagctaattattttttttgtatttttagtagagacggggtttcactgtgtcagccaggatggtctctatctcctgacctcgtgatccgcccgcctaggcctcccaaagtgctgggattacaggcgtgagccaccgtgcctggcctaataataactttcaaagcctaacagttgctaagtattgtggtgtcatagtaagcactttgcatgtgctgtcttcattagccattacagcttctgtttcatagatgagaaaatgagggcacttcttccaacggggacatttaagcaagaaaagccagtgacttggccaaagttgcataccaggcttgccagtgagaagacaaactgaggacgggttctctgaactgtgccctcttggctctctagaaagaactgtgtggaaatttctggattcctgtgtcttagtccatttgggctgctatagcaaaataccatagactgagtagcttatgaacaggagaaacttatttcttgggctaggaagttcaagatcaaggtgccagcagattcagtgtctggtgaaggctcaatttttcatagattgcaccgtctcactgcttcttttcatgatggaatgggtgaggacgttctctggggtgtcctttatgagggcactaacctcattcatgaggctctgccctcatgacctaattgcctcctgaaggccccacctcctaataccatcgagtcagtggttagatttctaacttgtgaattttggggggatacattcagacagtagcggaggttgagtgttttaccccaggccacacagctaagaagtggcataaccagttttgctcaagctttgcctgtcacacacagggattggcaggttcccctgtagtcccctgatgttctgaaaaggtcactggtcttagattggccacctgtgatctggctgctctcagggaagtcacttcacatctgggtgctttgtcctcggtgacctcagggcttggacgatataatactaaagtctctgatcctctcattctgaggttcccagtgcccatccttctataatacagggattaggagggagaatccctgagatgtttttgacatttgcctacacctgagggaacagttgcacatcttcctgatacggccagttggaagtgtggtttggccattcattccttccctacaaaattacctctttgcacaaggtagaaatgatccccaccttgtgccaggtttgttctaggcttttgatggtgtgggctttgagtgacgtccacaaaagcgtgtggggagagggttgctggtgaagtgatgtcactgtgatttcctcctctaggtgaaacaaaaacgtggttgcctgcagcctcattcgcaccagagagaagccagccacgggcgtggcaagccttggaggcccaagttgagccaaagacctctgtgtctttccctccatcctgtttccgtttgcctttaggcccaggtggctggcagatgacggtgaggagcgggtgatggggtaattcccggaatgcaaactgtaaccagggcagtcagaacaaggattgttaacctgcagccgcccagctcctggctcatcccacgaggcgttcgtgattttactcacctcattagaaaagtttacttaatgtatctgtcgtagattttagaactggaaaagaggttgagtgactttctttttctttttctttttccttttttttttttttgagacaagtctcgctctgccgcccaggctggagtgcagtggcgtgatctcagctcactgcaagctccgcctcccgggttcatgctattctcctgcctcagcctcccgagtagctggggctacaggtgcccgccaccatgcccggctaattttttgtatttttttttttagtagagacagggtttccctgtgttagccaggatggtcttaatctcctgacctcgtaatctgcctgcctcggcctcccaaagtgctgggattacaggcatgagccacaaagttcctgattctctgcggcccactcatgacctcagagctccagactcccaagctccctgacaccagtatttgggtggatgggaagaggcctgcagattgcagtgggtgaagaggctgtgcacacccagctgctgtggtggagtggctgtccgccagtgtgaccagctaagttgtcttctcatttcttgctgttgttggtgccaccaggggtccttacccctggcattgttgtgaggtgcctagggagctggcagggctagtgcacttcttccaatgggaacatttaagcaagagaaaccagtgacttggccaagttcgcataccaggcttgccagtgagaagacaaactgaggactggttctctgaactgtgccctcttgcctctctagaatgaactgtgtggaaatttctgggttcctgtgtctccctcaggaactggctccaggctgcccctgtacccagcggcccttgtctgtctcctcccaggccgaggcaggcactgcgatggaggcaccctcttcactgtgtttgccagtgcactgcagtggagaggttatgcctttgtagggttgtggggatagggctgaaagccccctgaaggcaggatccacgatggaggagcattatcgtactctggtgggctgggaacatggcccctttcccaagttctcctctctgtcagcctaacaccagcttttcggagagaaagaatcttccaggtttcctgagatttgcctgaggtccctgaggctctccttcccacttcaatctagaagatgggagaggctctaaatgacttaatcacagatctgaaagcccagaaggacctgagagaggcttggcctcctgcaggcatctgccttgtagcctcccgggaattggaagcttacagctttgcagcccaggccattacttggcagcccgggcctaaagacattatcttagaccaaggtgtgcctcccagtagccctggctgtgatctgagaggcacacagaacgcatatcccattctccttccagggtgaccaagtattcagagtgccaaatcttcttttggaggtaagctctcttcccttaaggtttctctggataaggtgtccaaacctctcctggcttcccttctctgtacatctcttttatcaatgcttctcctaaaatggggacacggaatggaatacggtgttcgaggtgtgacctgagtggtgcaggaatcatgctgctgtcacctccctccatctggacactatatttctgttaatgtagcccatgactgtgtaatttttcttcatgggcagcttctagatatggggattcccattccttcacagctcctgccaaaataatctgtggcaaagatctgtttccccagcctggactgttcacagccctgatgagtagcccaggccacctcatctgagtcccctttgagtggcccagggagctaaggtcaagggtgttcagaagctggtgagattattgaggcctgacccactttgcagaggaaggctggagctttctgcccaaagtgactgtgatggggattggggtggatgggcttccaggcctggagaaggtggggatgtttcatgcaggctcctacccctgaaaatctggccacccactcaccactgggaaccagctcctgtgtcttagcactgccacctccccctgggcctgccagcctctggcttcatttcttttttgctcaggaagcagagataaggtttggtgctcacctttgcccagttgcatagagaccctgtgacatggacatattggatgacttccctggctgagccatggaggaaactgtgtttcaactgaagacattcttgtggtgtctgcccccagggaagtctcttggtatgtgtgtgtgacacagggctcagtttggggcactgggcatggggaatagggggcaaaggaaaggaagactcaactgtgctttcagggagccttcagccagcaggagagagaaaccctgagcatgctggctgatgggaaatgtgtatcaaaagtttccttttgccaggaggaggcaggcaggactttcagctccccaagtctgggccatttctggaagcatgagggtttggagcttgtctttttattctaaacattgagcctgcagttttaactcctgggctgcccgttggtcttgtctgtcctgagctgcctgcacatcgatctgatcgtgaagggtgggtggtgagtgctccggatcgtctcagcagcatctctgccttagatggattctcagctgcccatctggaaggtcaggatgccaataggtgggggcatcactgtggagtggtagcgaagaattccagttttgaggctcacgagcttccaggattccaggcttggctctgcataaagctcactacagaatcttaaactctttgtgacttggtttcctcaccttgcctttgatagtggagttggaaagccccaatgcaaggggaggtgatggtctgctcaggcaccccgccccaagaatagagatgtcagtgattcacaggtgcacagagaacaagctgggacatcctcaaagtacacactctggagtgctgagaactggcttgttacccactcagctgctcactggcattgtgtttgtttgtttttttgagatggagtctcaccctgttgcccaggctggagtgcagtggcgcagtctcagctcactgcaacctcttcgtcccaggttcaagcgattcttgtgcttcagcctcctgagtagctgagattacaggcacgcaccaccacacctggctaatttttgtatttttggtagagatggggtttcaccatgttggccaggctggtcttgaaatcttgacctcaggtgatccacctgccttggcctcccaaagtgctgagattacaggtgtgaacctccatgtccagcctgctcactggcattgtgaccttaggagagttaattttctaaagctctgcttctccagctatgagattggcataacagtgtctacttcataaggctgctgttagaatgagaactaatatatgttatacacttagcccagtgcttggcatggagctgagtctctggaaaggatggctgttcttatgatcataggcaaatacagtgtggtcagaagagtccagcagggactgaaggaggggtggggctgtaaaagcagatgggattgcagaggaggggagattgtggcctgggggtagggacaggaggatggtggggaagagatagagaactgcagaaacagtaccttgaaggccccctgcaaaacttgtttggagacctggaaattcacaggtgtcagtcacccttgggctacagagggggctggaactcaggctggtcatgaaccattttgtgcccccattgtcccagccagagcttttggatgagggataggcacgtgaccagagccaggccaaccaggaaccttccctggagttttctgaatggaagctgggagagaaagtccttttcttcttgagggcatggcatgaaagaagcctggcagctttggccacatccactgccgtggagagacctgtcctggggagacagcacagcactagcagctgaagagaagcagagctggaaacttaagagaaccaatacctctgctcgatttgtcttcctctggcttggtgctgaatttgttagtttctatagtctctgtattagtccgtacaggctgccataatgaaactccacagactgggtggcttaaacaacagacattttatttcttcacagttctggaggctggaagtccaagatcacagtgctggtaaattcagtttctggtgagggctctcttcctgccttgcagacagctgccctcttgctgggtcccacacggtctctcctctgtgtttgtgcacatgggaagagacagctgtctggtgtctgttcttataaggacaccgcttctatcctaatcagaccccacccttaggaccacacttaccctttatgacctccttaaaggccctgtctccaaacatatttatgctggggattagggattcaatatgtaaattttgggaggacataattcagtctgtaacacttctctattcagtagattccctttctttttcttttcttttcttctcttttcttttgagatggagtttcactcttgttgctcaggctggagtatattccctttctgtgccttaaggaatggcattcataccactggtagaacacacaatgattttcagttagatacttatggactggtacaaaatataagccatgtattcatctatgtgtgcattaaagaatgacaaacacaactagtacatagaatttgtgatgttcacaagtgaagggagtattcagtattgctctgcaggaggctgagtttaataaaaagtcagtacaaggtcaatagtaatgttacagttggtacacgggtatgacagaaaactccaaggtagtgaattctgggtaatgttgcatgaactagtttgggttgggtttgtgtcacttggcactggtagagttttgaataatacatgttcaatttcagcctaaggctacctcttttcatgtaacaaatatgggttcctaaatgtttatttacataaaacctttatacatataattgtaatttcgagtcacaaaaagtggtcagcacctaaagacaactgtagtaaatatttttgtaaagaatccttttttatagtatctggtttgtttcaaatgcatctgttttgcaaatttagattcttaaacagcaacttgttatctaggattttggtcatcagaaacttctcagctggcacctgaaaaacatcagcacagtgacagttgatatatttaattgttcaaatgatcatcttagcatcaaacatgctgcaataaaaagtgttctctttgacatccattctccaaccaataataaatacacttattcaaaagttaagtaaggggtgtatttgagagctaacccatcctggtaaactcatactggaaaacctgataagcgtttgcagatctttttcagaatctgtaagagttatgttgtaggagagataatcacctgtagcactggactcagcatttttagactagaatatcctctcccgtcttgttgagtgatggtgatcatattttctgaatcaaaaatcaggatgagtatttggatatttgaaatcagaacttctcctaactatcatcttttatctagatggggactctggagtctcattgtcaaatttgtttatgtgctcatacaaattttaaaaaagtttgttgttgtttttttttttacttaaaaaattggccctaccttcagaccatcctgagacttatttcctcatcctagttttccccgaatatcttagctcgtttattaatatgatagaatgttaaatgaggtctgtagtcctaccaccccccccaatcctaacaaacaaaagaatattttctaatgttacctgtggaagcagatagcttggtgggctgaataaatgattagaatttaagagcctagttttaggtattctagttactgtaggctgtgtgaaaaaccaccccaaaacttagtggcttaaacagcaataatcctttgtcctgctcatgagtctgtaatttgggcagggctcaagagctacagtttgcatctattccacatggcatcagctgggctgcaatcagagctggaagatccacttccaaaatggcacattctcatggctggcaagttgtgctggctgttggttcttctccatgcaggtttctccacaaggctgcttgggcttcctcaaagcatggtggctgggtttgaaaagttaatcccaatgtagagtggagtaatagacattggagactgtgaaaggtgggaaggtgagaggcgggtgaagatcaaaaaacgacctgttgggtacagtgttcactattcaggcatgagtacactaaaagcccagacttaaccactatgcaatatatgcatgtaggaaacctgcacatgtaccccctaaataaatacaaataaaccaaacaaaataattatatattatgaccaagtggagtttatcccaagaatatgaaaaaaaccaaaccacaaaagtgaatggcccaagaaacaggaaggagagacggctaatttcttaagggctggcatagaaatgccagttatctaacagtctctggagtgtcacttccatatactactggtcaagcagtcacagagtccagattcaagacggtggggacacagaccctacttcttgttaggaggaatttcatagaatttggaggctattttttttttttttttttttgagacagagtctcgctctgttgcccaggccggagtgaagtggtgtgatctcggctcactgcaagctcgcctcccaggttcacgccattctcctgcctcagcctctggagtagctgggactacaggcacccaccaccacacccggctaattttttgtatttttagtagagatggggtttcactgtgttaggcaggatggtctcgatctcctgaccttgtgatctgcccacctcggcctcccaaagtgctgggattacaggcgtgagccaccacgcccggcttggaggctgttttaaccataacaactggtctcacaaaaaggaatatccttccttctttttctttgagacagaatcttgttctgatgcccaggctggagtacagtggtgtgacctcagctcactgcaacctccgcctcttggcctcaagccatcctccctcctcagcctcctgaggagctgggtcttcaggctcacaccactgtaccccacaaaatttgttgtattttttgtagagacagggttccaccacgttgcccaggctggtcacgatctcctaggctccagtgatcctcccaccttggcctcccaaagtgctgggattctagggatgaaccactgcccggcctatccttccttattacagaccttccctgaggtttagattcatcttctacttgcagtcttttgtggaggagtgaaaaagaaatgtttggctgggtgcagtggctcacgcctgtaatcctagcactttgggaagctaaggcaggcagatcacttgaggtcaggagttcgagaccagcctggccaacatggccaaaccccatctctactaaaaatacaaaaattagccgggtgtggtagcacatgctagtaatcccagctacatgggaggctgaggcaggaaatcacttgaacctggcgtgtggaggttgcagtgagccaagattgtgccactgcatttcagcttgggcgacagtgagactctgtctcaaaaaaaaaaaaaaaaaaaaggagtgtttataaaaacttgcttgtatcatttgagctcagttatagttagtaaatgttttgcttgaagccccttttatatgctaattctttaaaagtggctaataatttaaaagtggctcccccttgtcctgggcatatagtggagctttatttcttcagccattcccagaaattgctgagactgggaagtgcaggctcttggctttgcagcaacggagtctttcgcagcaagaccatccacagttaagacccttctcagagaaactccactgtggcaagaccctgtgctggctgctgggggctgcagatatggatcaggggacactccatccctgtgccccactttcaggaagcccaaagtatcactgatggaaagcaatggcctcagtgtcactttttctcagggtgtccttgtcccctggcagaacacagtggaagtgtgtctatattctgaatgaactgttgactacttctcttttccttcctggggcacttgattttagaaagtgccctggtctaggaggaccaagacctggcttccagctgtgtcagataattacccccactctatttttctcatcggtaaaatagggaatttggtctaggctgggggttggcaaactacaacttgcagactaactccagcccaatgcctgtttttctaaatgaaagttttactggaacacagtcatgcctgtttcttcacgtacatctacggttgcttttggctggttacaaaaaaaagaacatatggctcacaaggcctaacatatttactgtctggccatttacagaaaacacttgctcacccctgatctaaaacaatggttttcaacttcattttagccatactgttttttttctggaaacaactcttctttatttttaacaataaaagcaattctcacagcacttggcatgtgcctggcactgtaccaagtgctttaaaactgttaacttactgcttaatccttatgaaaacattatgagatgagcagtagtatcatcacccacattttagagaggagaaaactgaggcagagttaacagagaggttaagtaacttgcctcaggtcacacagctactaagtggcaaaggcaaaatttgaattcaggagtcctgctctagagtttgccttcttatccactgggccatgctgcctctcactggtggccttatataaaaactgggtggagcaggccccactaactagaactgatgtggcatggtcagcatctcccccttgcctgttgactcttctttctgcagccccccgggatctcagggccatctctggcaacctctggaggctataacatctggcaaattaggcttctaagcttggagaggggacatcagtttgttttggttgctacaagaggaattgatcctggttgttgggaacttatgcaggccaagaactgtagaaagcactgttctctgggactgaggactccagacaaatagactcatttttatcgagcatgatcataattatgcctgataaaaatgagtgctagagacttaggtccacatttcaaaaccgtaactgaaaggaagacatatttcaatagttgccatgccccacacaaatatgaaaaccagtaatctattggaaccagttccctgggccagagtgatttgccttagactcttgtcataaaaatcagcaaaggagactgcacactgaaatgacacttcacactgaaaagatattgacgctgaaaggagattcacgctgaatgtcaccttccctgcttcctcctgcaaatgaccccacatagcctggggggcatttaggagctttagcatagcacccgcctcttgggcaggtgggagcctggggctgcagaccggccctttcttaggatgctccctgtttgcagattagtgacttgattggcccctcctccacccccaccattcccataagggactggttagtctgcagggatgacacccactgacacccagcctcctccacccttggggatgtaaactgtactaggagcaggaaaggctggggtgactcactttcctgccagtgaaaagctgacctcaatcttggtagtggtttgaaggtgacttttgtattcatctctctgggatcttgggagacagtttcaactatggtatctactcagtttccctatgggaccccactctggcctgcagctcctctgccctgtacagaagggtctcctgttctaaggttttttttgttttgttttgttttgttttttggacagattcttactctgtcacccaggctggagtgcagtggcgcgatcttgactcactgcaacctccacctcctgggttcaagcaattctcctgcctcagtctcctgaatagctgggattataggtgcacaccaccacacctggctaatttttgtattttcagtagagacagggtttggccatgttggccaggctggtcttgaactcctaacttcaggtgatctgcctgcctcagccttccaaagtgctgggattacaggcgtgagccaccgtgcctggccctgttctaaggtttttgctgtctctgttttctccttggttggcctgtgcctgacacagtaagatttgggacccctgagattgagtggggtggggtcttcccaggtgcttccctcttgcttgtggtctctggccctgttccccgccccagccatcagcaccagtcccctaccccctcaaaaggctcaaagacttcctgagaacccggaatctcagtttcatctctgctggagatttttgatctgggggaaaggctgctctctatatggctgctttcagaccacacttggctctcccttggtttagccaaattggggttttcctcattttcaggagccagcttttctgaagtgttccttcctggcagctgcattccccatggtcctgtctatcttaggggcaaggacttaggcatcgggtgtcctagaggctagaagattgttctacagagaaaagtggttttgtggccgtaggtggtacccagacgtgttgcctgccacctgggtgcaagcaggaccggacctctgtgggtggtggagggagcttcccatgtgtggatggaggccttgctggggaagggtagatgagtacagctccgtgtcacagcccggggacagccccacctgctgcaggcggccttcgctaggcctctgtgaaggtccccaaagcctggctctcctgtggcttatcctgggagaatatttgccctctttcatctaatagttaactattgacagaacattaggtacttgaataaaatgaagctgtttagtttggggagatattttggaaaacagaagcttagttctcattgaggttaccttcttggtgtaggtggttgtgtaggtttttgttttgttttgttttgagacagggtcttgttctgtcacccaggcaggagtgcagtggtgcgaacacagcttactgcagcctcgacttcctggggtcaagtaatacttccacctcagcctcccgaggagctgggaccacaggcgcacaccaccatacccagctaattttatttttttgtagagatgggggggtctcaccttgttccctaggctggtcttgaacccctgggccccagcaatcctcctgcctcagcctcccaaagtggtgggattacagatgtgagccaccaagcctggtcggcttgttttaaacaacttaatgttattgaaaatatgatgccaccctgatattgagataaattttaagggaagaatcacctctttctcattacttgaatactgtgttaatttttgcatattaagtcaatttcctcctttaatggcaattggttgatccatggtcatgttaaataattttgcatatttaattaactcgggtcttgatttgtctccggtcctgtttattactgatgtcaccgtctgtgtgtgtcttgtgatgtggagactttgcaagctgttttccacggagtccaagccccacagccctgctgtggcactgccttcatcagtgacgcgttcttggcggagaggatctagttgtagtttgtgcttcctggctgtcaagggccttgccttcccttctacaggaaacagctgagaaatcgctggtgtgctgtagccttaaataacagcacctgccactcagttgtgttgtctttcatgagttttccaagtgctctcctgccttggggcatgtgggaaggaaggtattatcatttccgttttacaaagatcccccgagagactgcaagtctcttggattttgctgctgacaccaggacaggaggtcacatcctctgaccctccatcttatgttctttccagcagccccagaaccagccatggaaaccaggggcagggcctctgtgctttagttccctgatctgtaaaataagggatcataatagtacctattttgtagggtcactatgaagtttagatgagctgccacatgcctgggacagtgcctggcacacaaccatgcaagctctcaggagggtagtgccccgtacctccaatcttgttatgtgggggacagacagatcatctggcttgggcgccccaccctgccatgcagataaatccatgcccagataacggtcatgtgggatgggaaggtggggctctagcgtgtgccttcttgctgtcctgtgctaggcatcttggggtccggcctcctgaacttgtgccctttcctttgccagagtgagttgcccaagaggctgagggtgggcatgaggctgcttacaaagctgagctgatgatagtttgcagggcacagcacccttcactcagggatgctggcatactctgtgggcttcttaacaggcaacaagttctgccagcccattgtacagtccccggctggctgcagtgtctgggcattctgcttctcagccttgccccactcactactttctcagtgagtgtcagtgagtaaacacgcacgcaaaagaataaaaccatcaacaagagaaagtgtggtgtgtaagggaaagggagtcattcattcattcattcattcagccagtgttgactacagtgtgccaagtcctgttctagctgctggggtgcagtggcgatcagggcaggccctgccctcatggagcttacagacaagaccatgacacaggtgcatgctatgaaaatgagtgagtgggacatactgggcctccccaaagttggtggggaagagagagaaggtaaaacccaaaataggttctgtgactggccagcacctcaggggaggcctttcgaggggcaagggtggagattttcatggctaagtcctgttgtctaggggggattgcccttacagggggtctgcatgacattagtcatgaatccaaggtcctgtggtggcatcagggctggcaccaaccacagcttgctgccgatgtccctcccatgctctgggtacctgtcatatttgacacctctgttgcagaggtgacagctagaaaagcatccattgcctttggggtgggggttcccatttgttgtctcatgggaaggaagggatgctttggaaaggctgtggaaacccctttgggctctgggtggataacatgagtggggccattggaaggggtaaagaatgctgagtcatgtctaaatgacagcacttcctgggcactcctacatgacttgcaataccccacaggcagggcccttcatctcagcctgtctaacagactgtggatttggattttcattcaaccattaaatttttaaaaaattctgtgaagctaatagtcaaagggttagtagtctcatttattcaccagatatttttcagcaacaacttatgtacctggcttttttctaggagttggggatatagcaggtgaacagaagagacaataaatcttgccctcatagtctagccttatgatagcagaagtctttctttaaagaaagatccctggaatctttaaatattaactcctggagttcacgtaggcatcgtgacagaggcacagggacagtggggttagctgggatgtccagggacagaaggaaacagaagcagtgtcactggtgaccagtcagatgggtggacgtccagcaccctcatgatgtggcagaagtcagggaagaacgatattctgtttaaaaagttgagcttataaatagccatattggaacatgtttattatgttgaggaggtaacttatacttgactggtcttctaatagagcagcaaatgtcattgagtattttctttgtgcctgggtacatggtgcccatggaaagatgtgttctttgccccagggacgacgatagttgagtaattagcaaataaaacaagggcaagtctattgagagccactttctatggcagggcctgagatcactatggaaataactcagtaagagcagtcagagaaggcttcctggaggaggtgtctccatgctagtcagaaagaagtggggaacgtgttctcagggagttagtaacaggggagcatggcttgtgctcatgggacagagtgactgctctgtcacagtggggttggcaatgaggggctagaggttagagggcaggggacagtggagaccagtggggggcttgacacactctgcagctgtgagccattgaaggttttgcagcagagcagtaccctggtgctggttgtacttagggtgtcagcgaggtggagcgagctgggagggcaggtatagcaagtgatgctggagagaacagctgaatgtggctctagagaaacaggctcctgcctggcaagtcacagggttgtgaataaatcactcatgctttctgagcctcagttcacctcatctacaaaatgaaaataagatttcaaatcctatttcatagattctttgtgagtcttaactttaagaatatatgtgacaatgctttaggaaaaaaaaaagtaaagtgtaaattcaagaaaaatctcagctgttggtgtcaggatccccttctcacattggcttcctgtacctatgagatagcaaaaagtaggggagaaatctcatattcctgtgagtacatgacattatcgaaacaccagaggaccagggaggatggtcagtgagctcacaagcattgatgtctgccatttgcatttaatcctcccagcagccccatgaggtggggaaacattgggaatcggagatgaacagctgcggcccccacccaaggtcacttagctggttggtgagacagggccctgacaggcactccttctgtagtagtgtgcctgggctgccatgacaaaatcccacaaactgggtggcttaaacaatgaacatttattttctcataattctggaagttggatgtccaagatcaaggtgtcagcagggttggtgtaatagtccatttttatatcgctatgaagaaatacctgagactgggcaatttgtaaaaaaaaaaaaaaaaaaaaaaaaaaaaaaaaaaagaggtttaatggactcacagttccacatgtctggggaggcctcacaatcgtggcagaaggcaaaggatgagcaaaggcacatcttacatggcggcaggcaaaagagtgtgtgcagaggaactgccctttataaaaccatcagatctcgtgagacttattcactgtcacaagaatagcacaggaaaaacccacccccacgattcagttatctcccaccaggagggtccctcccatgacaagtggggattgtgggagcttcaattgaagatgagatttgggtggggacatagccaacccagatcagttgctctcttctgaggcctctctccttggcctgctgatggtcaccttcttgcagtgccctcatgtgatttttcctctggctctgtctgtgtcccagcctcctcctctcataaggacaccattcaaactgaattagggtccactgacatgacctcattttaccttaattaccactctaaagtcttttcttcagatgcagtcatgttctgaagtactgagggttagggcttcaacttacgaatttggtgagttcacagttcagcctgtaacacatttcttcaggatttccagagcgtgcacagttttgagcagaaaaacgcactgctggaggaaaaggagagaactggaaaattccagcaagctgtcatagacttgatctgggggaggtggggccccactgagaaagatgacaaggtgaacaaagatcagcaagtgattcggtgcacccagcaaacttagaatagatttacttcaagaaattcataaatgaaaaaaaaacaaaaaaacaaaaaaaaaacttgggtttcaaaaaatttctattaacttgctttataaaaagatttcataacagggttcctttaaatacccagccgcaccagtgtacttaacaagtgatttgatttaataccatgtgattaaagcactacgtttgcagagcctagccattaaaagcaggacagacaacctgtaattaaaattttgctgaaccctcctcctccaaagaccagttcagttcgcagaggttgatggtgaaagcagccgaggcacttcaactttgctccccagtgtctttgctctaggtcagtgtgcacagggatgagaccagtcttgggggtgtcagcaccagcccctggccccctgcctggggctggcatacccctcctgctgtcctaggacacagcattggcttcgatctattccagcagcaatcttaccttgtccttctttatctctgtttctagggccagtgacattggtctcctcagttaggggcaggcagacatagacaaatgaatagtgacttttgtccgaacttcatgttagcaatttcaacctgcaaacattttacctccctcaccagagctgcaaacacgtggccacgttgattggtttacttccagtcctccctgtgagtggaagagcagagatccaaaccccttgtaaaaagaggtagacaataaccactcccagagctgtggagaggctgaatgggcagaatgtgtataatcagaaaagcacacatgaggctggttcatttgcagagaagcaggtcatgattctcagcgggtaaaagccaacagtgattaggaggaagaactcttgtcatctgggaccgaggaaatggggctttaataaagccagttgctgtttgggtgtcagagtctgagtcctgtccttccatcatcagtacttattaagaacctactgcatgccaggaactgtgctatatattgagggcactaacagtccctctggtcagagagagccttctagcatggaagccttagtccctgccctggcgtgacgcacaggctaacggaggagacagacatccacgcacacactgaggctgccagaaaaagagaatcacagggcactggggagtccctggggggtggggggagcagtggtgcctggggaatcaggaaaggtttcttagggaagtgatgattgagtaagttgagaacaaaatcaaaagtcgaaggggagttactgtggccaagaggtgggagaggcgtgcttaaggcagacggaactttatatgcagaggcctggaggtgagagagtgagtgcagggggtaggggtgactcaggttatagggacccagactttgaggagggtggagggaggtgagggacagggctagagagtggagcggggaccagagtgagaaggccacatgtgtggagatgagggatccagaccttgtcccaggattttcttttggtgtgttgaaaatgttctggagctggatagaggtgctggctgcacaacagtgcgaatgtactaaatgccagtggattgtatactttaagatgcctaaagtagttaatttcatgttacatgaatttcactttaataattaaaaagaaagatatgatctgcaaagtatggaagtattgttttcaccctgtccccacctacccccttccgtcttgccttatgccctcctggaggtaacagtttgggtttgtttttgtttgtttgtttgtttgtttgtttgcccaggctggagtgcagtggtatgatactggctcactgcaacctctgcctcccaggttcaagcaattctcctgcctcagcctcctgagtagctgggattacaggcaggcgccaccacgcccggctaatttttgtatttttggtagagatgggggtttcaccgtgttggtcaggctggtctcaaacccctgacctcgtgatccaccctcctcggcctcccaaagtgttgggattacaggcgtgagccaccacactcggccaggtagcacttttaaaaatattttgtttcccctttcagtgtttcttcatgcatgacaaggaatatattcttattctttcttatatcaaaggtgccattctgaaaatgctattttgtaccttgcttttttcatctaagagaatattccatcagtgtcttccatgccagcacatagtgatcctccttatttttttcctgggtatataatattctatagtatggctataccatgctttattcatccaccccctatttctggatgtttgggtggttcccagtcttttgcttggacactgtatactgtgtagtcaaaggcaaatcactcttggctcctggcctcagggagcctggattagtcagggtctccagagaaacagaaccatgagagagagagagaaagagatttggagaaattggctcatgtgattgtgagagctggcaagtctgagatctgtagggcaggctggcagcctgggaattcaagtaaaagttgatattgcagtcttaaatccaaaatctgcaaggcagcagactggaaactcaggcagaatttttatgttgtagtcttaagccagaattatttcttccttctctttctccttctccttccccctcaccgttcctcctcctcctcctcctccttctcctccttcccctccctcctttctccttcctctttcttccttcctccttccttcctttcttcttgaaacctcagtctttgctcgtggggccttcaactgattggaggaggcccaccaacattacagatggtactctgttttcctcaaaatcaatttattataaatgttaatcacatctgaaaaataccttcaaagcaacatctagatgagtgtttgagcaagcagctgggcaccatagcctccccaagtcaatacgtagaattaaccatcacagatccaagaaggatgagggtaaaaagaccctgggaatgcagaggagaggagcctgggttgcctgtgtggctatcggaggtaaagatgagtcctctctttttataactgaggaaactccggctcagagaggtaaattaaattgcccaagattacacagctagtaggagctagaagcagaatctggcctgggctagtccagtacaaaactcacatcctaaccccatgggagttaatgctgcttcatacgtggggtgtgtgtcatcctggaggagaaatttgatctggccccagaagaagaaggtgttgatgaggtagataaagaagagtgattggaagctggatgcagtggctcacacctgtaatcccagcactttgggagggtgaggcgggtggattgcttgaccccaggagttcgagaccagcttgggcaacatgaagaaaccccaactcttcaaaaaatacaaaacctagccaggccactaccattagtgtgtgcctgtagtcctagctactcaggaggccgaggtgggaggattaattgagcccaggaggttgaggctgcagtgagtcatgatcataccactgtactccagcctgggcaaaagagcaagaccctgtcttaaaaaaacaagcaaaaagaagggcaattggcattttcagctcagagaactggctgtgcaaaggccagtgcgggaagtgagccgtctcggaggtagccaacatgtggctgaagcagtctttaaggacaagagcccttgcgtctggatcaggaaggctgccctggactgcactaagaggcatttgggcttcatttcagggcctaaagtcacaaaacggcagcctccagccaggtctggctcagcccacagagctgctggggtcagagcagctttaaaacactacgtgcagggcttggaaggccagcagagcacgggacatccctgtgtttcatgacctccccctccccatttattccagtcacctgcctggccctgtgtcctccatgtgacccaggccaggggtctccaaaatggcttactttgcaggaaaagacaaatgtgtacacttggctcattgtctgtttatttttgtacatgtgtaatgttgcactgatgtacagtgtgtacattttaaaaacataccaacaaagaaatttaacaagataagtttcaaaaagtaagcattctaatattttctttctatgacccagtgatcactcaggcaccccacttttgaatccctctaattagatgatggggagttaatgaaggcaggtttctgtgacaaaagctccaggtggtttctgtgacaaaagctccaggttgacacatggtggcagggcggagcttgagaggggtgtggttaggtcaggtcagcggacaagggccatatccagccacccacgctggccattcgcagtgtgccatcactgtgcggggacgggaaggcagcacactgcactgtgaatgtgcaagtatatctgaggacatcctgctcaccatgcctctggccgcctctgtatcaggtgctgtcctgggccctctgacacccctggtggctggtgtcattacccagggggaaggcagtcgcatccccagcagtgcttggccatacaggtcaccttccacggagtggagtctggtgtcaccgggcaccctcaggtctgatttgcagtcatctcaccaggtctcacctcctctcagcaagacctcccctcacctcttctttcctgaaactgtcttccagctcctccttcctgccggggcggcttcctgctgtcactctgaagagggagggtctctgttcctgccgctcttcagttcagacagatgccagctgcccggagttgcacccatttggggataaatttatttttctttccaagtggctttgtggtgaatgggcttaaataattccctgactatcctgtttaaatttgctccctctcccccagttctttgcctcctctgttttatttttctccatagcctgcattatcctgtgcataaaaactagtgcatgatattgcattaaaaaaggaaacaaaattaatgtcttaaaacaaccatccttttattatttgctcagagttctgcactttgggcaggagttttagggggtagagagtgggctgggaaaaggtcagggcatctctgttccttgtggttcagcccagggccgcttgggaccctccattcttctctgcgtggtgtctgtgtgtggttagcttgggcctcctttcagcatggtgttgttggctttattgaaaggtgactggcttccctcagaacagaaaagcaaaagctgctagacccggagtcacttgcgctatgtttctgagcatccagccacacactgggaagtgtggcgactatctcgtcccctaggagtgtggtgtgaaatgctgggatactcgatcaatgttagctctttcattagacacagccctggactgtcagagacccagctcttgaggtaggtgacttcctgtgtgacctggcccaagactcactccctctctgaatctttaaaatggggagaatagaaatatgggctagccacatgtctacctcaaggggctgcttggagggccaaatgagataaagagtaatagtgatgacaggtgttgggaactgggtatgaccaggttttcagaattttgctccttggagctcccagttccagacacagggagccccgcctctgccaggactcctgggggcagggtccagggtgcaggggaaaggtcccagcttccccttttgaggtggccaagcaggccgccgtcaggtcagcacgtaggccttgagtccagccacttttgttgagtgtttaaaatttaccagggactttacatcttttacatcttttctcatgtaccctcaaaacagttctgtaatgcaggtgatgctttgccccccgacagctgttctatggcaacacggccgagtaacagaaccagaactccatcttcaacccactgggatccagaccccgtgcctttttcccacaaagctggccagtgacagagactcttggcaaaataccagaattttccttactgtgaacactgccgactttaattagattaattttcgattttcttttgccttcaggggtttaaagctgacccagctggattacagcagcgcactgtgagtggaacagagttgcggtgtcaggacctccaagccctgcaacccccagcacaggctttatttatctatgcacccccattgagaggctccctcaccctctgaggggatggaaggtccgtggagatgcagctttgctctcccgggagggtctctgccctcaggctcagaccggggccgtcctaaagcctccctgccccggatgccttttgatgaaggctgctttgtgcacacacatgtgctgggctgtggccgcaaccccaagccctagttatccacagtaaacacagaacagcaaccaccccgtgcagccttctctctccaaggtaaactgttggagtaagggcttttgcctggacgaaggcctagtcaatgagagtgctttgctgactctaactcttgcttttcaccctggggagccaaccacaaacatttgtggagacccacacatgccaggcagggcctgtgctgcagaaacgtgcactgtggaacaatcggcctcagagagccgccgaagaacaatgcaggcttgtggattgtccctcccggtcctcgggcagcggcgcctgtgtacagagcacccaggtgtgcccccttgccctggcccgagaggcgccgaggatggggcctgtgttttgggggtgtatggtcacttgcactgaggctgcccggggcagggttgacctttggaagatcaaatatgtggccttctgggctttgcccaggccagctgctgacccaagggaggaacactcagtgtcgcgtgatgtgttcccctgtcctctggcctggccattgtcattgcaaagctgaagagatagaagaatttgcggtagctggggaagggaggcggggtactggtgccagtgaagtcccttcttgagatggccttttggttcatctgcggaccttgctgtctgcccatttaggcgctgccctcaccctgggtcccacttgccactctgctcacgttgagagtcctctttctatgcggttctctgcttcagccaacacaaacagcagaaataagccgggagaagccacctctgaatggaggttctttttccagattcgctgtgccagccggggcgtaaccgtttaattgctgacactaagtctctccgtaataccaaatgaaacaaggttccatggtgccctgagtacaggatttgagtatgacactaagaaagcagagaataaaaggacgcagggaggattcggtctgctcaaatgcacttttaaaattctcctatttacaccgtaattccctattctcctccattaacttgttttggtggtttagggcttgtcttttgtgtggttttggttttctgggcttcgccactgaggagagaacattctagaagggtgaaattgttaattattcttaaaactttgagagctgcttatgtggaatatgtcctatgagagcaccttgatattgcaagtcgtggcctccattcccctgggatgatctgcggggacagggtctgcccagagccctggtgtcagggtgtgatactgactgagtttcacaggctggcctgggggagccaggacttgaggttggagacgtgaggagaaaatcacaaacagaaattgtggctctagacaaatgctgcctcatccacctgaggcggggagtttgggtagattggaatctgacctgtgtttccgccccaggaccaggtggtagcaacggtatttaggtttttaaggtgggtgatgtcaaaagccatgtccagaagaaaatagtcttgttggccctattctttcaccctaagagatttaatccagagacggtgtgtaggatcctgctgctgagatgcgccgttccttccccggcttctctcacacctggacttcccttctgccatattttgtttgtctttggccaggacactgaaggatagtgccatagcccctgcgtggccctcatcttcagctctttctctagtacctattttagataaaagcttttttgagataaaaaattcatataacataacattcacccttttgaagtggattttttttgtcttcttgtttcttttgtttgtttgtttgagatagtctcgctttgtcacccaggctggagtgcagtagtgcaatcatggcttactgcagcctctatctcccaggatgaagcaatcctcttgcctcagcctcccaagtaactgggaccacaggtacacaccaccatgcctggctaatttttttgtagtttttgtagagaaggcatttcaccatgttgcccagtctggcctcgaactcctgggctcaagtgatccgcccatctgggcctcccagagtgctgggattacaggtatgagccactatgtccagcctaaagtggatggttttaaatatattgacgatgttgtgcaaccctcaacactatctaaccccaggacatttcctcaccttttacgcccattaccataactctcatttttccccagcttcctcagccctaggcaaccacttatgtgctttctctatagatttgtctattctggacattttataaacatggagttatacaatatgttctcttttgtaactggcttctttcacttagtgtaatagtttcaaggttcatccatgttgtggcatatctcagctcttcattttttttttatcactgagtaatgttccattaggtggttactctacattttatgtattcctttgtcaatggatggagctttgggggttgtttccatattttggctattatgaataatgctgctctgaatgttcaagtacaggtctttgtgtggatgtatgtttctaattctcttgggtatatacctaggattggaattgctgggtggtatagtgactctatattaaccttttgaagaacgccaggttgtatttcaaaatggctgcaccactttacaatcgctttagcaatgcttgagggttccagtttctctacatcctcaccaacacttgttattatgtctttttgattatagtcatcctagtgggtgtaaagtggtatctcattgtggttttgatttgcatttccctgatgactaatgacgttgaacatcttttcatgtgctttttagtgttaaaagctcaggtttagatgtttatccaagtgtatatctttggaaaaatgtctatcaattgtttgcccaacttttagtttggttatttgtctttttattgttgaattgtaagagttcttcgtatactctaaatactagacccttaccagaatttgcaaatattttctcccattccgtgcattgtctttttacttgatgatttgctttgaagcatacatatttttaattttggtgaagtgcaatttatctcttttacttactgtttcattggtgtgcttttggtgtcatatccaagaaattgttggctattccaaggtcacaacaatttacttttgttttcttctaagaggttcatggttgtacaacgctctgacatttaggtctgtggtgcagtttgagttaatttttgtatatgttgtgagctagaggttcagcttcattgttttgtttcattttgttagagacagtgtctcactctgtcacccaggcaggagtgcagtggtatactcatagcttattattattattattattttgacatggggtcttgctctcttgcccaggctggagtgcagtggtgcagccttggctcactgcaacctccgcctcccaggttcaagtgattctcccaaattcaagtgattctcctgcctgagcctcctgagtagctgggactacagtgcatgctaccatgcctggctaatttttgtatttttagtagagaaggggtttctccatgttggccaggctggtctcgcactcctgacctcaagtgacctgcctgcctcggcttcccaaagtgctgggatgacaggtgtgagccactgtgcctggccatctttactgttttacatgtagatacccagttgtctcagcaatatttgttgaaaatgttttttccattgaattgccttttgtttttcttatatgcctctttcctactaaaaagtaacttagttctctccttttcttccccccaagcccacacacacacatctgctagcctgcctcaaagtaccaggcatccctgctgctctaggaaggcctgcattgccagcccagaaccttgaccctaactcccaggtccctttctcagatggatcttggtgtacccaggtctctttgtgtctttattagtctctctggatgctagcattcatctgcttcagggaaagggaatgaaggaggagctgcatgggatcaaaaaaccccacattagtgtgtgtgtatattttttcatgcctatatttctgactcccaaatcaggtgtaaactttcctagtcatgaccctcttggagaccctcatccattcgtacaaaaaatgttcacaagttagataattaaatgaaggaactacgatgtctctgatggacaagtgattcactcaagtggtactccatccatccatccgtccgttcatctgtccatcaatcagtctgtccacccattcatctactgagaaataaaagagctggttgcttggtccctgtctgccggctgggtcagagttctgctacaggtttgtatgttgttagaggctcaggttagctgcccatccaagtggaagccaatttaccagaaagccagagtctgtggttactgtggctgtcgtcacgggtagagtgcttggtgcgggtcactggcactgaggcctttttagtgagtgggtcccctcaggagggtcaatgacacatctccaatcagcaaacaagagttagagcagagggatagtgtagcctcagggccccttcctccgttccaagatatctctgtctagatactgcgcattagaatttagtactgaagaatgaaggtggaggctggggaaacattctaactctcgggggccctgtgccaaccacccgccttcagtggtaacatccttgtcacctttgtttccatcacacctcacctgtgttgctttctacacatcctgaagtttaacttaacctggacacctttgggccccatgacccattggtgggagcaccacactactacttagaaagtggggtttttgactgtggaccaccgttcgggaccctctctgactgggactgtcattcccctgtttaccggaccgtcgtctttctgggtactctgtcctgcctgtcccagtgtgcagggctcctcctcccatcctgaggagttctttcttggaattttggctcccccgccctgcagcttggtttccactcccacctcaaggattagagttctgacctgaacctcagaggaggacaagtcccctgcctggcaggatgtggattcaccagggccgggggcacgggattggatatcaactattccactagctgcaggcatcgcggccccacccagctgacactgctttcgcatgtattgctttccagagatgagagcattctgcagtactgcccgggggctgtcttctctccatttagcaatgcgatgccacaattttgctgtgccattacacatttttccttcagcgtcattccagcatcagctctctaatatccctttttatagattttccatttcacagtgagagaaggtgagacagcaaatactgttttcgcaaatgcaggggctgatgactgagtttgatgtttttttttgtttttgtttttttttgggttttttttgttgttgttgttagattcctgagacgtaccacgtcccagcatgaattgtgtaacttatctgccctgtgtcgaaaattagactttgctcctgtattttcagaaataattcttgacaccctcttaggttttcaggctgtgttttggctctgccctcatcttatctctgggttccaagagcttttttcccatttctctttttttccatggcccatgcctgagttgggttggcaggttctcctcttcttgctgtgtccctgcagagtctctttctggcactgccttaaccactgcacttcatctgaggggagagagaggaagagccacttggctagggaagcgagtgctttctctgctggtaaagatgtctgggagaagggtccccccacccctgtccagtgtgccccaggggtcgggcagccagtgaccccttccacctcatttctttctttttgttgcctgcacaggactggagagctagcatgagtatctgtcctgcaagagcttattaagccctgcttatacacgtggcaccagggaggtgttattatcggtcatagcaaggcagggagggacagcagacgggaaggagttaaagttctccacaaggaaaagtgtgattaagtggcaaagggaatggtttggaaataagtgctgggggctttcaggggaaggggaggtcatatgggccaaagcggggcagaccttctgtctgaggagagtgagtagacccagaaggatgatgggtttggagttgggtggagagggacccttattggacagggaggatgtcactgtattctccctgagggacctcctgtgcgatttggtgtctgaggggccgtctgtttcaagaagtgggaggcgtggtggggtgtgggggctgggtaccctgagagtgtggtgctgtaatcaccctctggccagcaaggaagcatggcaagacttggccgagacagctgccagtgtcagaggaagggtcctgggccggagagtagaggcttggcaaggcggcagggggcaggaggcatgagaagctggcttccatggggcagggcagggaggtcatggaccacgcatggtgtggacacacccgtgggaacagagaagaaggggagagggagacattttcataaaaggtccctcagggcctaaagacaggcttctggggataaaggaggtgcctgggaatggggttgattctgtctggctttctgggggcctcatgcacatgagggcgtctttgttgcctgcataggaccacgtcatgccctcctgcctcagggtcccctctgtgtttcacgtgggctcctgaggcacattgcactgcactgaccttccccctatgtgctgtggtgcctgggcccagagacggctgtgaccttcctggcttccctgctagcataggttagtggtggtgcagaggtggtggtgggagtgcttgcggtagtagtagtggtggtggtaataacggggttagagctgctgctctgcgctaataaacgttttattacctctagttcgtttagtccttagaacaaccctgtggggttggccggtcatacagataaggaaactgaggcatagagacttcagcaattgcctgaagtgccacatctagtgaggggcagagcctggactgaacccccagcacatggctccagactccatgctcctgggcactcttcctcctcagcagagcaggccagcactgcagaatcgctttcatcatgccatttagaaatgggcagctgagggtcagcacctctggtatgcccagggtgtgccccacctctctgccccatgtctgctgtggtggaggggagggaggaggatgatgggggagtgcccagatgggaactgctggccttcagggggccagctgggccattggactggacaaagcctgagcacagccccagttgcacctggtgtgacccccacacatgacctggccatggggaaatctggccctgtctgggtggggccaacagtgctttggccctaagagtcttaggcttcccaaagagtgaggaaggacaaggaggcagagcaggggaaaggaattcacagttcgtgaaattagatgctgcagaaaatgttaatgaatgccctgttatcttaattttctcagagtgtgaagtgtttaggcatcatgaggatgagagtgttaccaaacccaggagagctttgagttcaggtcgcattattcttagatttgtagtttggtggggaaaggagtcggactatttttagagggcgccgatctcggtttgtaattaacagacagtgtgccctcctgctatgcactctcctcactcacactttgctgtaattagtgttttaatcatcttctacaagatcctcaggtccgcaagggcctgcaacatgcctgtcttcttcactaccccgtcctccatgctgggcatatgagcagggagggaggatcgattccaccatgagggcttgtaggaggtgccaacaactgggcagtcgaccagtgggaagttgagcaggtggcaggggcagcctgaactgagcatggatggacagaaggtatgtcatgtctggggaaagcaagtgccaaggatcctgggatgaagttggggaatgatgggaagaagcaggacaggaagtgccttgaatattaagtcactcacttctcttgtgtttagggagacagggctgaaaacacatactttgtagaaagaacaggaacggtttcatgattcttgtcttttatcagacagggcctctataacccttacagcacctttgtgagaatcggaaatagacatctcttatcttggtggatgaattttgaagaaagcggcccctgcctcccctcttcccacccagctggctgcagccttgtaccagggcacaaggcttaacaaatagggtttgagctggctcttggccctcacttgctctctaggatggatatttttgagcagtacacaagctgcgcgactgtatatgatcaccctttgagatttatggtctagatttaggcttctgattggagatagtataagatgggaagcctttctgtgtcacccaactctgattgtcttatttacttacacaattctgttagccatatgttgctgttctttgcacaagaaaccagggactattactactggaggtcaggacctttataagcacattgtccacagttcccaaatgtcctgggccctgaacattgccatcacccaggagcttatcaaaacgctgatttctgtaccccaaaatcccattgtgtgtgatgtaggagctaggacagagtccaagaacctgcattttcataagctctccagttgcacaccacagatctaacccacttctagacaaggaaacagaagcccagagaggtttggtgacttgcccaggccatcccaaactggagaggagacctgagtttggcgatgttcagtgcaggcctcctctgactgtctgcccaccatgctgaacccagtcctctccaagctctcccatctctgacgatctccaaggccaggaacctggctctgtgccattttgtttacaaactgtgcttcctttagccatcaatgttttgtcccctcttagtgtattatcagtactttactgaagcataattcacatacagtaaaatgcattaatcttaagtgcacagcctgagggattttgacaaatgtttatacccctataatcattgccccagatccaagtaaaggtgatttccattgccccagaaggccatcagttgttctgaaaggacagaggcacctattgggggacagagatcacttctgtttgttccatgcgtgtgtctttgggttttctgtaatcttccttggaagggtgaggcctgcggatggggcagaggtggaggagcagtgggaacaatgtgtagccacatttctcaaacccagagcattgtcatgtgccagggcagaccaagctgccgggtaaaagtgctgcatcttcttggggtgttaacaccatttgaagatcgtgcaagaaaatctatctttatgttgaaatatagggatggatagagagcagaatgtaaaactcatttggatattgacgacaaaacattcaccttttagaaagtggggaaagtgggcttctcttaaccctacctctggatccccaagggtagcagtcttgctcctgccctgtcctagccttaaggagagtttgagaagtgccagtgtgtggcattcattgctgaagccattcagaggatcccatggtgttctgtgtgattgagatagggcctgggaatacagcctggacacccacaccatccacacactgggggtgacctgctgggaaggatgacagtactgtttcccctggagacttggcaggtggcgcatcctccaaaactctttgaagaatctacatttttaagacatgaagctgtggacagggacacttggcattttcatcccatccctaggaggggctagagcatccaagcactgcaatatactccagcctgaagaggttctctgggactttgttaaggggcattgaccactgttcccacctcccagggacagaatcggctcagagcgtttcagccgtcgacccagccactgagcacgcctgctactcacagatgtgcctccctttctgtttcatatagattcttttctgatgctttgttttcctgcctcaatttcataaatctttatagttgagttttaaaaaataacttgcaaatgttttccctttgggtgaactcttgcttctgtgtgttgtgatggtggcgatgctgattccaagagctaaatatgcgatgaggatgcctgtcgcaggggtggtggcctctgccctcacttttcctagagacatatttgtaagtgaaatgtcaaaggcatctttggttatttctaggttctacatatatttaacgagttttaaaatactcgtgccaaattgcccagcagaagataggttgcacatgttttcactaccgttagcggacagagagcacttgtttccccaacaatggcgatcagcattcctttccacacttttacttttttttttttttttttgagacagagactcgctctgttgcccaggctggagtgcagtggctcaatcttagctcaccacaacctccttgattcaagcgattctcctgtctcagcctcccaagtaactgggattacaggcgtatgccaccatgcccggctaattttcatatctttagtagagacaggatttcaccatgttggccaggctggtctcaaactcctgacctcaagtgatctgcccacctcggcctcccaaagtgctgggattataggcgtgagccaccacgcccggccttaaatttgatagatgtaaaattgtaccaaagtttcctttgcatttctttggttagtcactgcgaagatttttcaggaatttataacctgtttctgttgcttcctttataaatttgctttttatgctctgctcattttgctatttttgatgtatttatgtctttcttttattttagttagagtcttaatttatagggtacctccttagtttccagttttcaaaaaatattatctctacccagactcagaggcttggaacagattcactccaaagcggtatcaggccaccactcctacacagtgtctttgggaacattagaaaaactgcttcttccctgtctcatacagcaccatcctaagtttagggcttagtgagtggcacccaggtaagttcaacctgtcctgggtcccttagccaggctcccctgttcagaacacagctgtacaacctacacaacccactgtggccactctagtgttgtaaaaagtgaactaagccacattcttttttttttttttttttttaattgagacggagtcttgctctgttgctcagactggaatgccgtggcatgatctcagctcaccacaacctccacctctcaggttcaggcgattctcctgcctcagcctcctgagtagctggaactacaggtgcgcaccaccatgcccggctaatttttgtatttttagtagagatggggtttcactatgttggccaggctggtctcgaactcctgacctcatgatccatccacctcggcctcccagagtgctgggattacaggcatgagccaccgcgcctggctgccacttttaaaaataataacgaaaactccaagccattgagggtacaatttttaatacaattaaacctcccagctaccactgtgggcatcatggtgttctgcatggaatctgattttgcttggcattggtctggtctgtgctgtggcatgccggatagcagaggcctgggagggagttcagaggcctgggttctagtcctggctgtgttactaatgcatggcatgactgtgggcaagccagctttttggggcctcacttttctcatctgtaaaaggagaggctgtgactaagtaaacttccaggtcattctcagctctaaatatctgcaagttcgagttttagctgtatttttcttttttcccccaaaagattatgacacctgtaagacaggttagttttagattttttctttagcatctgggttatgaaaaacaaaatccattttgacgtttttgcattccatcaaatttctacctgatttatgctgttttacgtgtgtctgaaaagaggattacttacacacagccaatcgcctttctccattttaccaaaggcatcttggggtctgtggagtcactgagagaaggcatggatgtgcttgacagtgggaaaatgtggttaaattactctcttggctcatcccaccttttccttctctcctttctcagtaactgtttatggggcatctccccggggaggctcagaactgagcaacccttcgaggacctctgtgccttgtggggagccgggaattactgggaccctcctaagtggcagctccatgggcattcttccttgctcgcatcctcatggcctctcccacagaggacaccccccagcccactctccctgattccactttctctaccaccccaggcctttcatgctttccagcattccccagaacccattctctgtggcctgtcaaaggtggggtttcatcccagccacttctccacttgctctcttcctagaccctctggccctctcaggtggccctgcctggcacctgtgtgctccacaccaggcctgtcttctgagcccaatccagctcccacttggctgccttagggacctctggacctcagatgtctcagaccatgtggtcccaaatctagctcgcgatcctcatccacagtccctgtctggctttcctgtcacctagctgatcccccaaacacatggcatcctgcctctcctgacccctgcccccaccctccctgacctgtctgtcctgcccctgcccggctcgctccacatccgtccttccttctcctggctgcatcttctgaggtctggcctcctacagtctctcctgctcccagtcttcctttattgctttgatccaaatttaaaacaaagaacaccgctgtcctgtggcgggctccctgcgggagtcactgctgtctctttacccttccccatctcaggaggggcccaatgcaggcttgcgcagctgaactggacttatccttgatcaaggtcagacttttccctctgattgttctgccacctcctcagccacacagtggctgagggcaccggccttttccctttcccctccctctctacatgtacccggcgcccctgtctcccataatcctccagaggttaagtagatccaagacccttgggctgcatgtcggagcaaatccagcccaactttttaagaaaaccagggctctgggaaggggcaaatgctgggtcacgtcgttggaggtttgtggcagggactctcatgcctgcgtgtatgagtttcccaggactattgtcacgaattatcacaacctggggggcttaagacagcagaaactcattcttttagtcctggaggctggaagtccagaatgaaggtatctgtagggctgtttccttctgagggccgtcagggggagtctgttccagcttttctcctggctcgaggcagctcccaacagtccttggcatgttagggctggcagatccagggctatgccggtcccctgcctgcctccatcttcacatgtactctcctcttgtgtgtctgtgtccaaatttcccccttcttataaggaccccagtccctggattagggttccagtatgaccccatcctaacttgtttacatctataaagaccctatttccaaataaggccacattcacaggtcctagggactaggggtccaacatgccttttaggagggaggacacagctgagctaatgcagtgtggtccatgtcacttgtttttgtggtgctagagagggaccgtgaggtgtgggtcacactggttcaccttgtgggtggatttagctggcctttgaggttgaaagttctcagcattgtatttgtaagacctgtatcattaataaacattttgctagtcttggatgcttctttgtgtggggggagctgggagatggaggacagaggtcacctgggccatctttccaggtgagattatacatttcagcctagggtggggcagagccacctcacggaagcatcacttttattctttcactttttgtcattttcccctttggaaactaagcttgttcgtgctctgggacgtgcggtcatgcgtccctcactgctgggttgagctggtaggcctgcccctgctttcctttacaggcgagtgcctcgtgctgctgtttttctgattgctctggaagttcattgttgctctggccctcctgacctgtgtctggcctttgcccatgtgcagagtttgtggatcagcatttcaggggtgcgggggcgtggtggtatgcgagtccatagccgtggaagtttgggacccaagcctcatgaggcagaagcctggctctggggctccatatttagtctggaatccagcctcagctgctgctctggggccacactggatgccagaaagggcagaacactggcccggagccagagctaggacagcagggcctgctgtgcagcgcagctggtgcccaaggggcatggaccttgctgggcctgcccggaactggcctgcccctgcctttgtgtcaaccaggaggcctgtgggaaagggggctgggaagaaagtgagcaaacacctcagaattggaaggatcagaactggacagggcctcggagtgacatagtccagtgcaccctttctgcagagaagaaagactggggtggcccagggcggtgacttgcccaaggtcacacagttaatggcagagccactagatttgggcttctggacatcaaatcctttgcccttccctggaaccatgctgcccaggaggccaggccgttatcagggtgggactccctccaggcaccaccttcgccagagaccagaagaggatggccacaccctcgggagcacgcaaattgggaaaaagcagacatccatttcggatgacttcctgcccctctttctgtactacttcccaggctccactggcttctgccactcctcaccctccaccccgcccccaccactgagacctgcttattatgttagtcatttaccccatagtgtgaatatcagtcctctcccagaggaacttggacaacagccatggagtgagagttggagtcagccagacacagccagacacagcattacgggacatgttgcaaggtgcatatggactgaaacaggcagatctcagaaatggaggaagcccctgggacctgctctctcaggaagggaaggccagggagagctatttccaaaccaacctgggaagtgtgggaagatgctcctagcacgtctcagctcctgtctagtgactgatccatctcccttgtccatggagactggctgacccatctcatgttctatagctcagatctactcaggaggcagtccgatggcctcactcattataattaccctgactcttctaaggcagtcttcccatcaccccaccttgtgggtcccaggctggctgtggatgggccaccctctgatgtggtacccaccgctccaggcaatggctgcccacaaggacagaacaggctggcctggagctctgagcaggacacatgggagaagacagactcagcatcaagaaaaggtcaacaccagcctggcaggtccctggccccacgtccagtatgtgcccttacctgctgtgtgaccttggtgtctgaacctttctgagcctcagtttcctcatttctagggatccattcttcagattagaggcagaactgaagagagtgcagctaaaggcttagctcccagtagccactcacatagctatcattgtggtgcgcatttcctcatgcaaccctggcaggtaggcagggccagtacttgtaaccccattttacagacttggaaattgatagttagagtaagtaatggacctacccagccctttgcatttctggtgctgcactttttcttttcttttcttttttcttagagacagggtctcgctctgtggcccaggctggggtgcagtagcacaatcatagctcattgtagcctccagctcctgggctcaagcaatcctcccacctcagcctcctaagcagctggtactgcaggcatgcaccaccatgcccagctagtttaaaaattctttttttgtagagatgggatctcactttgctgccccagctggtctcaagttcctggctgcaagtgatcctcctgcctctgcttcggaaagcgctgggattacaggtgtgagccactatgcctggtcagtgctgtgctttttctactgaaacaccccggtattatctgtgggttttaggagcagttctcacccttgacccaattaacctagataccagtgaataccttattgtaaagctctctagctgccgagagaccccagcttcctgggttggtttgaaaatagctctcctggctgggtgcagtggctcacacctacctgtaatcccagcactttgggagactgaggtgggcggatcaactgaggttgggagtttgagaccagcctgaccaacatggagaaacctactaaaaactacaaaattagctgggtgtggtggcgcatgcctgtaatcccagctactcgggaggctgaggcaagagaatcgcttgaacccaggaggcagaggttgtggtgagccgagattgcgccattgaactccagcttggggaacaagagtgaaaccctgtctcaaaaaaaaaaaaaaaagaaaaagaaaaagaaaacagctctccctggccttccgttcccatgtgggcaaggagtggatgctggggcttggcctcatgggagaagctgtgcgtgggcaaccactcaagtgcagtgagtggattaataaccagcgcgagcctgcctcggccactgtcattcccatgacacgcaacttttgtcattgttaacagttggagactgtgtgcaggcctctgcctggcagtgctgaggatagcgattagcagggagtggcggggactaatcgctctcatcagccgggaagaatccaagcctgcctgccgttcacaggtggcctttagctccttgggccccagggaaagaggaacaaagggaatcgctgcaaaacatctgggggcttcctcttgttccggagaggcaggctgccgcggatcagggaatggaggcagcggggatctgggaggcccagaagcagtggaaccacagctgggctggtgtctatacagcccatgtcctgccttcagatgagcaggaacatttttagaggatgcctgtgaagttttctcctgttcctctcaccctgggcatcatcagggggctctgtatctggtgggagcatggcagcattcaaggtgcaggaggaagctcaggcggagattccctctggtcagtgtacagttggcagaaatgcccgggagaccctcagctggggaacgcacccaagatggagagcaggggcgtcaacacctccgctgggattcttaagacttcgcagaaaagggcaagtttgtagtgcatttgaaggacttggttgaattaaagcaaaattatcctcattattgtcatcattattgatattaataatatgtaactagaaatcttttttttttcttttttttttttgagacggactctcgctctgtcgcccaggccagagtgcagtggcgcgatctcggctcactgcaagctctgcctcccgggttcatgccattctcctgcctccgcctccccgagtagctgggactacaggcgcctgccacaatgcccggctaatttttttgtatttttagtagagacggggtttcaccgtattagccaggatggtctcgatctcctgacctcgtgatccgcccgcctcagcctcccaaagtgctgggattacaggtgtgagccaccacacccccggccaattcgaattcttttgtattttaaagctgacttttatgttcttaaactctgggaggttttttgtttgtttttttttttaagatattattcttatttatagatataggaatgaggcctatagatgaaggtggctggctgaggtgagcaggccaaggtgaggatatacctttgcctcaggtggggttagggccaggcccagtgatgctgggaacccattcagatccttttctttcagaatatctggcatttagttatgcactgtgtgatagaggctcctgaacaatttcttagaggactgtttcctatcaaccagatgacatggaccaaagaggtgaatttttacctctcctgtgccacagatccctcctatgaacacaagccccccctcctatctgcccccttcccccactcctgcaatgtgcagcagacagtttctttggtgtcgtgaactgtggctgcagtctggcctacccttttccggcgggtcctgggggatgccttgctcaccggctggcttcctgagcctgcaccccatgcggatgcacggggtcccacactcagaagggttcatgtttggttaatactccatagtcactgttttgaaatttttattttgagcaagaagcccttcattcttccccacccccaccccaccccgccccaactgggcctcgaaaattatatagccagtcctgcttgctccaggccccacagttgttgaagcatggatctgtgctcctgactgccacgtggcaggtctgtgagctggcctaatggctatggagtagccggcagaggcccaggggctgaggcctgagctgtttgtggggcctggcatttagggcagcgtagggatttctggaatgagtcctcacacattctccagccaccactttccaaccctccctccatcccggcctctgccccttccctcctcacttggaaacaccaggtgcacgttgtgaccttgttggcaaaaagcaaggtgccggaaatccatgcacccacagcagataactgtccccctcctgtgcccatcctgaagctggcccaatctgagctccccacaggagtttatttttgatagatcgagaagactagaactatccaaggaacgagaactgccccgcttgggcctcctcctcacctggtgcgttcagtcaggctgcagcatgccctgaggatgtgctgcaagtccctggggccaggctgagagagctgaggcccttgtcttgatgaactgcaggagttgctgtcagggcctgctgggccctgaaggcctccagtctgccaagagggaggtggccgtgagctgagtggtgccaagtctccggtgccaggcattggaaaggtcatcttgacatccgtcttcccttccctgtctcgaagcatcaagtcacaatgaacaaaagaatcagcactaagcaggcatgaggaaatggacccccgagcctggccacccaagggatggggtcaggggacctggcacctgggcttcttgtggcctatccttgggtaagtcataggattctaggattttaaaggtggcaggcaccttagagctcacccagcccagcctcttatccagacgaggggactgagagcaaaggggagagtgggagcggctcccttccaggtctcagttaggattaggattgttggttgtgctgtctattgctgtgtaataaattacccctcaaattaccccaaaacttagctgaaactacgtacatttattttttaattaattaattttttttagagagacagggtctcagtctgtcacccaggctggagtgcagtggtgtgatcacagctcactgcagcttcaacctcccagtctcaagtaatcctcctgcctcagcctcccaaatggctgggaccagcggtgcacaccaccacactaggctaatattttatttttttgtagggttggggtctctgtatgttgcccatgctggtctcgaactcctggactcaagcgatcctcccacattggtctcccaaagtgctgtgcccagccttaaactacatacatttgttatttcatggtttatgctggtaaagaattggagctctgcttagctgaatcccttgctctgggatctctccgaggctgcaatcaaggtgtcagctgaggcaatattcaactgcgggaagagccacttccaagctcatgtgtgtgggtggtgacaggattcagttccttgcagcctgttggactgagttgtccacagttcctctccagcatggcagctggttcatcaaatcgtgcaagctgaggaggcagtagagtcaacaaggtggcagtcatggtcttttgtaactgaatcacagaagtgacatcctatcacctttgtcatactctatttgttagaagcaagtcaccaggttcagcctacagtcaagggaggagattacacagatcatgaatgggaggaggcaaggattattcaacaccatcttagaaagctgcttaccacggtgacatagaacagaaaatccaaagaacagaggtttaaacaacatactcctttatttctttcttacgtctacaggcaggcagctcaggcctcgtgtgagggctctgtgatcacaggggcccaagctctttctatctttctgctttgccctgtgtaatagttgaccgctatcttcaaagttgtctcatggcccaagagagttgctggaactccattcatcacatccacaatccagacaagaaagagaaagtgggaagagcaaaaggcatgtgccaatggaatcagtcccttttccttttcttttctttctttctttttttttttttctttttgggagacagagtcttgctctgtcacccaggctggaatgcagtggcgggaccttggctcactacctctgcctcccgggttcaaacgattctcctgcctcagcctcccgagtagctgggacaacaggtgtgtgctaacacacctggctaattttttgtattttagtagagattgggtttcactgtgttagccaggatggtctccatcttctgatcttgtgatccgcccacctcggcctcccaaagtgctgggattacaggcgtgagccaccgcacccgtctggaatcagttcctttaaagggttcagtaacttccctttacacctcattggtcactcctatctgtgagggaggctgcaaaatgtagtttttctctaggtacattttctcccccagtgttataaggattctgttaataaggaaggagagaatggattttccagattcaactagcagtgactgctgtttttaatggctcctcaacctgaaggtgtaaagccatatcttccacctccactgcatcatgtgggccctgccccaaattcctggtctcctggggatgctgagtgggtggaataaggggcaaatgttggaggataaagttctagtgcaacataggatagaacagtgaacgaagaagtgtaacatcaactggcctcttcgttcactgcctcattcatttatcatcgatttgctgactgcctaccttgcatgaggcagcaggaaaaggaggaagacatagagttaagggaaccacagcctccagcgggagacagacctgtgactggatagatgaccagtcagctaacagtcaccagaaagccagccctgggaaggaaggcatgcaggctgggacttgaagggtagtgatatgtgttgaatatgtgtcccctctcaatctcatgttgaaatatgatctccagtgttggaggtggggcctggtgggaggtgtttggatcatggagatggatccttcatgaatggcttggtgccatccccttggtgataagcgaactctctccctgagttcacgtgagacctggtttaaaagtgtgtggtaccctccccccgccccacccctgccttgctcctgccctggccatgtgacgtgcctgctttcactttgccttctgccatgagtgaaagctccctgaagcctccccagcagccaagtagatgctggtgcaatgcttgtacagcctgcagaaccatgaaccaatgaagccttttttctttataaattacccagcctcaggtattcctttatagcaatgtgagaatggcctaacacaggtggatagcagttgtctgggcagaatgggctgaggaagcagcctgtgtgctggcatgcagctccagccctcttgtctggaggagggccaacgctgggtgttctcttttccagcctgagaacttggctgtttcagatgaggagacccagtggccagtgcaggggacggatctctgcctgcagcagggcctaggatggagcctctatcaccctctattccaatgccctttcagcctttccagctcatcttctggctgcggcaccctgaagccaaacccttagacttccagtgggcctgcagtaagctccagactctgaaacagtgggtagatggcctgggtgggcagggaaaccccagctgagggtaatggggagttggcggaggctctgatggtcttaccagggctccagatttttcctacttggcaacctaaggaacatcacaggcatcccctgaaccatagttgctttataagtcacaaacgaacaatcaaaaccacctaacttagcctgtgaacttctgctcattcatatttaagttttcagaggctcagcctgaaggaagttggaagtgtgctgtcattagcaaggagagaaggtgtggcaggcacctctccgctctgaggccaaggtagcaccttccaaggatgctcaggagtgcatgaagcctgtcctgcctccagcaatacacagactcagaatatatgcagcagggcctgctgaggttgaggggagccagcaataagctcatggcaggtatcatctctgtgcatttaaaatttaaggtcagaacttgggaaccctttggtatttgccagccagaaggatctgcagctcagagggccatgaaacggtgaaacggcatggtggtgtgggcgggcaggctcctgtacttaccattgtggtcaacagagagggttctataacagcacgcagggcaagaatgagcatgatagcaccaataaggacatcagcatttcttgaatgtagtgaagtattcagcatgggccaaaagtactttatggggactatcttccttgcaagagacccagaacggagacactgtgattagtctccacctccaaccccagcctttttcctggagaaagggcaggggacaatcccagcaagactctttctcacccctgcccctatacgagtggagcagattccagattcaatagtggtgcatggagtgatcaatggataggatgccgccacctttgacctgaagactttagacctctctgcgtgggaggactgcccacccgacgggggcctgagagctttaacagagcagaaaatctcctctctgccgatcagctcatgggtgttggaaaggcctggcgaactgtaaagcagtgttgctggaggagtctgagcagatggttctattggcccagggtgtggccggggcctcacactgataggcatgccctccgtatgtccagcatgtgaccggatctgaaaggacacagactcctcagaaccagtgttctagccaggggggtcaacagccaacctttacatttttcctcttaaaggtttttttttttcttgttcataaaaatgccaaaatctcattttggggagataaaaagaaaatacagaaacagcaaaaggagaaaagttagtcctaataccacctctgaaagatgtctttggatatttgtagtttacagtcctatttctatgtattttcatgtagttgagatttcagggtctattaaaaattgtgttttctttcctacatatcatggtgtcatgagcaatcccgggttattacagcccttcgtaaacaattcctgagggctgaataagctagcaagccatgtctgtagctgagtgtgggcacgtcttagtgcccaccagactgtccccctcatgccagcaccttcctgctcagctggcctctgcactgcccatgtccacaggcacctggctgtgctcacaggatccagaggattagaaggagatctcctctagcgacagggtgggtaccatgtgctggagttaggaggcgaaagggtgacccctgtgtcttgcgtagatggacaaggcccccagtgtgatgtgatgagccctaacagagggtgccgtgacccagccttacctggcctgtcacggggcttccctgagccagcccagtgacctcaaagctttcctacctgtgacaccctccaagtggccaatccactttgagggtgtgaggtgagaagggacaactcacctagctgccaaccaatgtgtctaataatctccatgcctctgattcctcactgtcaattggagagactaatagcatgcaccccatggggttgagagcactaaaagcaatcaaacctgagtgtgtgcagagtctgcccccaacccccgaggcatgcaatagatgcgccccatcattgcttgcttctagggagctcccagggtggggagctggggctgacacaggaagtaacaagagtgacttggcgctggggagactgaggcctcaagagttcaggaacttcctgaaggtcatgtggcggtggcgatgagctccgaagcctgtgtctgtatgtgcttcatttgtgtgtcactccccatgggcacctttgtaactgttgtgtttttaattttctgtcagttggagcaagcagatgtggctctgggcaggatttcctatgctgtccttgtcacttcatactctgtcttctccttgccactctggggatgtccttgagcagagcccatctctcattcgccttggtatcccaaggtctagcacagtgcctggcagacactgaggaagtgacaggcgtttgttgcgctttgagtcaaggacagagccagagcaaaggctactgggtgagctgaagggatatttcttctgagctctgatatctcggtgtccccagctctgttcttggcttgtcactataaatcagactggaatgctggggtttttcctggcagtctctccatcccctctcctgaatagtgctggatgagatagacaaattcttcattatcttttgcagccaaaccagttcttccctttccctgcaatattcccagccagccctgagtagcctcctgctacatcaatcccagtgcagcctgtctcatactggtgacattttacattggcatgtccctggtgagaatgttaagctcgttgaaatctgagaggcgcctccttgctctctcagccacgtagacactgtgtttccttaggccactgctctcctacgtgttgggtagacacatttccaatttggatgatggtcctttcaggctttggtctggcctgcggagaagggtatctcagctcagctgaactgagatctgccctcaccactaaggtgttaggcccgttctttatctagctataggaaaagtaaaaagagcttttgtagaagcaaagaggacctgatcgtgttaatctgtgttaatttcaagggtccagcccggcgattccaggctcccaaaagaaaaatgtgttttcccccaccttgatctactgctctgtgaggtagatgtactgaccgcatgtttagacactgagaatcaatttagcagccttctgatctctatatattctgtgcgtgcacaacaggaataatgatttttaacactgggtttggcaagggcgttgccagactttctcataggcgatctgatgggaaagctgtccccccgagggtccttcctgtagggagagttatatgagtctgagaaaacatctggccagcctcatctgtaaacatggcacaatattattgaatgacagcctggggaccagcctgtggggagtggaaatgcagtctcaggacagctataaactaatggtctttctttgcttactgacacattgaagcagggttctgagatggcattgagacaagggcccccatcacccaccctcactggcttcttggaccaagactgcatatactgatatgttcaactcactgtcttgtatgctctaaaacacttttgttttgaagcaagaaaatggaagacaagcttagggatggcagtttcctggaggcagcctgagggatgagaaataaaagacattggcacaaatctcaggaagcaagaattttagtccaggctctgggatttggggtgtgtcatatcatagctctgtgggtatgtttcctcacctataatatgaagaattggcttgctcgtttcactgatgctaggaggcatgttcatttcacatcttaatgtttcttaaatcaggctgcatcttactatcgctggcatagcacccttgctgttgccagatgacaggcaggacatagtcgtcatggcctgagcctgtgtgaacatgggcctactgttcatagtgtcacatcctccattaaaagaggtttgttgttgattagccatgtattgagtatgaatgtcgttaaaggtgtctacaaaagggtctcatcatgatttattagcagaagggccagaagacagagcagtggggcaccaatttaatattagagaagcaaatattgttggaggaaagactgcaatctcataaaacagtaagaattgtcagtctcatgcatgctaaacaatgccacgaaaggtggaagaaattgccagaagttgactcagaagagatgaaacagtctcagagccaggtgaggcctgcgtgagcaatttgtctacatgtaagactatcatgaaggcattatggcatagcttaattgacagcatattttctctgtggttcataaaataatggtgagccttacagttgatgactttgctttctaagatctcttctagttctaatgtctaatagttgtgttttcatttttctgtcaagtggagcaagcagatcaaaaataacgtttttggtgtttctctcctatgttggtgctgcttctctgggcccctgtagcacttgacccttgatgtcataactgtgtgatcgcttctctgcccttcgttttgtgtccgtaacattcaataccaagcttgagttagtgttttttaaatggacatatgggtggatggatgggtgggtgaacgaatggatgaatgggtggatgaatggatggatggatggatgaatggatggatggatggatggatggatggatggatggataagaatgggtggatggatgggtggatggctagacaggtgggtgggtgaatggacagttagatgagtggatggatggatggatgaatgggtagatgaatggatgggtggatgaatgaatgggtagatgaatagatgggtggatggatggatagatggatgtatggatggataagaatgggtggatggatggatggatggatggctagatgggtgggtgggtgaatggatggatgaatggatggctagatagtggatggatggatggatggatggatggttggatggatagatgggtgggtggataggtgggtggatggacagatggatgaatgggtgggtgggtagattgatggatggatgaatggatggatggatgcagggcaggtgggtggaccgatgggtgggtggatggatgggtagatggatggttggatggatacatgaatgggtggattgggatggacggctagataggtgggtagatggatggatggatggatggatggatatgtgaatgagtggattgatggatggatggctannnnnnnnnnnnnnnnnnnnnnnnnnnnnnnnnnnnnnnnnnnnnnnnnnnnnnnnnnnnnnnnnnnnnnnnnnnnnnnnnnnnnnnnnnnnnnnnnnnnnnnnnnnnnnnnnnnnnnnnnnnnnnnnnnnnnnnnnnnnnnnnnnnnnnnnnnnnnnnnnnnnnnnnnnnnnnnnnnnnnnnnnnnnnnnnnnnnnnnnnnnnnnnnnnnnnnnnnnnnnnnnnnnnnnnnnnnnnnntggatggaaggatggatggatggatggatggatgaatggatgaatggtgggtaggtgggtggattgctgggtggatggatggatgaatagatatagatgggtggctggcttgctggctggctggagctgcaccatgagatgcatcctcatctttggtgaggcaacagatacccttccaggaagcttcaaacaagttctccagattcagtgggagcctagactcagtgaaatttttttttttttttttttgagatggagtctcactgttgcccaggctggagagcagaggcgcaatcttggctcactgcaacctccgcctcccagattcaagcaattctcctgcctcagcctctcgagtagctgggactacaggcacatgccgccatgcctggctaatttttgtattttagtagagatggggtttcaccatgttgcccatgagctgaactcctgagctcaggcaatctgcccacctcggcctcccaaagtgttgggattacaggtgtgaaccaccacaccccgctgactccgtgattttttttttaagggttttttttttttttttttttttttttgagacgggtctcgctctgttccccagggctggagtgcagtggtgtgatcttggctcactgcaagctctgccttctggattcaggccattctcctgcctcagcctcccgattagctgggactacaggcgcctgccaccatgcctgcctaattttttgtatatttttagtagagacggggtttcacagtgttagccaggatggtctcgatctcctgaccttgtgatctgcccacctcggcctcccaaagtgctgggattacaggcgtgagcccctgcgcccggcgttttaaggcttgtcattgatgttcttttattcatttggtcctagatgattctaacaactatggtttttttggagaggcctccaagctactaagccagagattccaacccaagtcaataatcatggggccaatccatgtacattacttttttaacagctttattcagattcgatttatatattttataatttacacatttaaaatatacaattaaatggttttcagtctaattatagatatgtgtgacctttaccaccttcatcacctctaaaagaaaccctttagctatcacccccttgtctccctgcctccttcctgcctcagttgtaagcaaacaccattctactttttgtctctctagatgtgtctattctggacatttcatattaatgaaatcttatgtgatcttctgtgactggcttctttcatttagctttgtattttcaaggttcatccatgtggtagcgtggatcagtactttattccttctaatggctgagtaatattccattgcatgcatagttcatattttgttatccagtcatcagttgatggatgtttgtgtagattttaccttttggctattattaataatggtactaaaaacatttgtgtgcaagtttttatgtagacatgtgttttcatttttctcaggtatatacctggagtggaattgttgggtcataaggtttatgtttaatggttcaagaaattgcaaaccattccatatggttttccacagcagctgcaccatctgacattcccatgagcagtgtttgaggactccagttgctccacatcctctccaacacttgactcgatactttgtaaggtctttttacttctaagcttctaggattctgggtgaaatccagtgacagttgaggctatgggaggctcctttctggccttatatcccctccttctccatgtctcagtgtagtttgcagatggctgtgggggatttctcagttaattatctgccagttaaccactcagcctgctccctgcggttgtatctggctacagacttctcctgctgtgtgtgtgaagaggttatctgctgctaccatgctctagtgggtgaaattaaccacagaaataatgggaagtagagaccaaagactctgatggactaattagaacagccatcaggagctgccccctgtgggctctctgctgcaaggcatctggctgcacctgggagtccttcctcactgcagctgtcccagactagcctgtgggaggagctcttaggtcacagaggcccaccatgggcctctcggagggagcccacagtcctcccttccggcttctgttgattgcccacttcataccaggtcctggaaatacaatgatgggaaaaacgaaaaggtccctgttctcaagcacgcacactagagtgggttcctgatggaattaactggaacttagatttttctggctgcctgttttcccaattacttgatcatgttccagagagaagtaactggggaaaccaaccctaggaaaccatacctgaaccttctatgtggccttggccaagaggtcttgtctctggcttggcaatctgttgtgggaggcctctgtaatcgggctttatgttctacaaggtagtggatatggcttgcaaatatgtgtggcctgcagagcttggctttctcataccctctaaccagaagaagcctttgcagctcaaaaggactgcacctgtctcatccgtccctttcccccttcctcagagctcctaccctatctcagctcaacctgggggcaacgttcagtgactcattggttcatgccacaaggagtgggaatctgagatattgctagtccagggcaaatgctcaggattggagtcagatgcctgggtcatcatcctgccctgtcactgggccactggcatactgttccagggtccccatatgggagggtaacagggggtggtgatgcatgctctgcctaactgcagccgcagggttattaagagctgactggcaggaaggacaatgctgagctgtgcagactccaggggcatgaggcccagtgccaccctccagacctccctaaatgacttcggactccctggagagtacataacttctggcaccctggacaggacccaaaggcttgatctggagcagtttccaatgcccactccaggagggacgacagggtctagcagcttatgggggatgttgggcaagggctggcacattgagggagtggagctctgggaccctcactctctttggtcagagtatccatgtcttggagccattctgtccaggtttcagttctgagccagcctcttcctagccaggtgaccttgagcaacccttcgtgtcctcagtttcctaatttgtacaagggggacaaaaataatgcctacattataggatgatcttgaggattaaattaatatatgacaagcatttagcacaggggccggcacatactaaattctcaataaacacaggtatttattatcttttatatatttggggggagtcgtttataatttcatttgaaaaacaagtatgatattagaggaaaatagtttggaaaccaacaatctgtggggaatacaatattgatgatttgctttcctgctttaggaaaggtcaaagggcagctgcctttgagcaggagtttccctccctcgggtcctccaagcaaaggcagaggcagctgtgctgtgttgtctctgggcctggaggccactccaggaatcaggggccctgggcttttgctgccgatttctttgcctccctgtggttcgtagagaattcagggagagctgtaagagcgctgggcaccggatcaagtctgagattcctgtggttgctgtccagcatgcttcaggcattgtgtgggatacatgagggctccctggcagaagaggggcctgccctctgacacccaagctgtgtctgctgggtccacttgtaatgtgccacccatctgtgcccatcagcagccgtctgctaataccaaggtgggcagagcatttgttacctgctgctgaccattttctactttctgggaatccatcatgaaactgtcaaaaagaggaactgaatgtctatggtgaggtcagctcaggctcccagggtccaaggaaaggagcagacaggtcctcagcctccaggagctcatagtttagctggggaaggaggcagccactcagctcacattaaggctgagctggagggtggtgggggcattacaggagcagtgggacatccctgggctgtcctttcctcccttgagacactgagcaggagcaccctgtccctaggaggagcttgggtatgcacagccgagtttctgctgagtgacaccatcttctataatagctgtggctatcttcagccaggttatggttgagtactgctggtctggagcctttttttctttctgcttgcaatgaccttgcatatttctgttttggacctggactatcatgtattatttcacagtgtaactcccaagggcaatccttcgtcctgatttatttccaagttctgagggggagccctcatttttgtaggcatagaccacttccagttagttgctctttcgcaggggactttcgaactcggatgccttacaggggccaggcaggtaacatgtgtgagtgagggagccaggtgagagtgaggctgtgagcagcggggaggcattagagagtgtatgggtctgcagagaactggggttgattgcctggtctgaaggggacagcacttcttagctctagctgatggttacagcgcaagaaggtgggccagtgttgctcgatcatccagttttttcaagaaaagtcagaaattgtggctttttatgtgaaatattttgatttataaacgttagctcaaatatttttaaaatatctaactggctaaccagaacacaccatggtccagacgtggccccagcacaggcggtagcaatctctgctttgtgactgtgctccttgcaggacaaggcggtcatcgaaagtggtgggggggtgggggcaggcagaagcccaagggcccagtgagtggctgctatgagcattctgaggggtctctgtgacctgggccggtcagggtggcatctaagaggtgggcttgagctgttcttgaggatgagtagagagaaagggttgctgttctcgaacgtgagccagttctgccttgcaaccatagcacaagaccacctggacaggcctgcaaggccacagcctgctgagatctagcctgtgcacagcctgttctgggctgtggacactcccaccaggctctggaaacagctcggtactctctctgctccagctggtctgtagttcagggagctgttgccaagagggagaaagctgactggggaccctggaaaccccaagacagatgccagagagaacgttgcctgagaaggaaggcctggagcgctgctgccaccacacttggatgccctttctagccttaccccaggtgcttgtggacacattgctgggttcagagcagggcactattggtttcccttcctagcatgctccaagttaattttcattcttggccaataaacccagaagcttttgacagctggtggtggggctcacccatctaccttcagagtccacagaagagagaatggatctctgtgagttcctgcaggttggcaaaacaggtcaacccagggattggaatacaggagagagccagactgaggcccaaggaggactcagggtgttcagagttgggaggcattagggagtggtgagatctgcagagatctggggttcagagatagcagtcgtcattgatatccagagtagtcaaggagggcttcagggaggaggtgtgcccagaggtgggccttgagggaaaaggggagatttggagaggcagaggtaggagagaatgcagaagacagagtgaggtatagcagttgtgaagtcgagtgacaattgcaactgataattgagtgcttgatgtatgcctagcggtgttgagcacttttctcattcattctttcacatgattctcacagcacctcatgaggtggcactttcaccatcagcctactttaaacatgaggaagcaggcccagagtccgcccaacagcacgcagagaaaaggtgatttagccagcactggaacccagactcgggacccataagcatgatgtcaccctattttacgagtgggggcagtgaggaagccacctgactccagccagggatatggctgtccagctgtctggtggccctgcacagttttggtttgtttcagctatgacttccctgtccctggtgcctctagggtgtatacagcagatgctcagtatgtcttagttgggaagagttgtctcgaggaggctcttgaatgtcatgggaagaggtttggagtcctggttctgggactgggtgaccttgagggtgtggggggctggagcaagtcaactcccagcatccattggctttaacattctaggagctgggagtggggctggaggaaagcccgggcccattggcagtgggcggaagagctgaggaggcccactctgagggaaggacggtgctggagagggcgtgggcgggctgggggagccacaggcccgtctacccattctgggcctgcaatggaagcaggtgtaggatggagcagggccctcaaggattacgcagtcttatcaataccaggcaaaaacctataaaaaaaattcaagagcagggcaagagttgggtagcagcccagaggcggaggagaaggtgtcaccaggcagcctgggtttggtgccaagggagcaggtgggtggtcagtgctggagcccagtggaggcttctatgggctttgggggcagacctggaaacaggggcacccagggataaagcaggacctgcacgtcacagagcccacctggatgcccacctggatgcccacctggatgcccacctggatgcccacctggatgcccacctggatgccctcccgcctattgggctaggcctacctgcccgggtgggttgctgtttcagtgttcttcctccgagaggaagtgctcatcaggagccaggaatctaatgaggcaccccccggggactgaggcctgtaccttccacactcctgcgggctgctctcccttcctccctctccagggcctccgatctcagcccccattctgggtgccagcactgcaggcctgctgagcaggaaagaatccatggcatctcccttgccttccggccagccatgccctgcccacctcatgaaaactggtccagctcctcagtgactcatggaggctactcttggggacagaggagtaagtgccaagccccagctctgtttccatgaagttctgatgagaccacagggcttggtccagggctttgcacagggtgggggctcaggagggtatgaggacaatgggatgattttggtgtcatctgttatttaggagtatctgtcatgtcactaactgcctgatgttgatgattgtaacccagaactgcgcttggggtccacagagcttaggagtcactaagggaaggaaggtgactctcagcaggggtccctggagaaggcaggctgttgagggatgtaaaggcttggatcctgcattgcagcctggctctacccatagatacctgagtggctcccagtacgtcattcccccttcagcccccaaggtcccagtgtcctcacctgcgtggcagcagctgaagagctgttgagggcaggcagcatagatatcaggaactacctccaacttgttcagacctggcagatgtgcctgagctccatgctgggtgttgcaggactgtaagcaggtgctgtcatgtcatgcgcctggccctgagagtccagtgtggaggtggtggccccagtgtccactgatcataataacctgtggaggtcatgcctggttctgagctccgccctgggccctgcgtgggccataagaggagccgccccttcaccagatagctgaccagctggccagaagtttggcctggggactccacccatttctagccctctggccagagcaagagtatctgaataatggataaagaagacgtgcaagattttctagatcttgtctatttcaagtgtagttctctgactggcagcagcagcctcacctgggagcgtgttaggaatgctgagtctcaggccccaactcccatccttgaaccagaatctgcattgtaacaagatgccctgtgattgtcgtactcattaaagtttcggaagcagtgctcccggccaatatgtttttcatgggtaggtgaaacaaaagtcccacaaattgatagttacaatgtgtgctacatgctgatattttcaatttagttatacattttttaatgctgagatcgtgacccaggaaatttgttttgcagctcatgaaattgctgagacctgcagtttgaacaccaccatgctagctaacaccctgttggatgtttgagtgacaaaagggttaatttggtggggtgacaggggatcagacgtttagaggacgtcagatgtccttgactcctgtgacagaaaatgttgccaatttccaaggtcacatgccttcgacttcatgcatttctgaactttcccatttcccaggggttggggacctggggctcctgcacatggaggcctctgcttcctcctgcttttctttggcaaacaccaacatggttgaattatcaggccagagcttgagggccgcagactgtcggggaagtacattctcgctggagtcttgaaggggagtgtgggctggactggggctggagggacgcggttggcagtgagcaggctcccatggcttcctcggggagagcctgggcaccctggcctctctcctccccactccagcaggcagcatggcctctggactggccctgccctgggggccacctgacagcctgcaagggagaattctagccccaattgtgcattctgggtgaaggtgttgctcccactctgtggggatgggaaggagagaggggatggaggggaccagggcccgaaagccagcagccagctctgcctataatagtcaccaggagctgcttgctggagagcaacctgggagcacagtgctttgcagcaccaggtgacatgggaagcggccacaggaaggtggggtgaagacgccagtggctgtgatgagtggatttagcagcaggagagcagggacaacactctgggccccattgcccaccacagctccgatgccacctccactgcagacttgctgttctgctgggacgagtggacagacctgtgagccccaaggctgctgatcttacggtcaccaagcaagccccctgcagccccacctgggccccctgcagcgggcctgggttccacaggaggctggaccccttgctgcagccacaagccaaaagatgagccaggaagcagaaattggggtcttcctgggtttcctcagtggggtgtcagaagggtgtgctgctggagtgagttgggtgctgggggtggagaggaaagagcctgaagaagtgtggggtgcagtgctgcctctgtgcgggcctcgaatgatggattccctgagaagtgctggtaggccctggagcagatgcatttcatctggtttgcaggtcactgaactcatccctgaggattggaggaggaggtaatgcccctaatgcctcgcagttcttaaaaggattggctaaattgatagctcctcatgccatttgtcactgggtgggcaggaaaggatactgagaaggctgggatggctccactgattgtctctagcctgtgggtgctctccaatgtcagccttaccttttcctccagacctcctgcctctgaaggtcagactcaaagtcagacttggccaggggttagagggagagactggcaaccgaccatctcaggctgccccacggtgttcacagaaaccccttccagaacactagtttcctaaggaagctacagagtgctgggctgagagcagcaagggatggggaggaaggggaggaaggcgaaggggagtttgtttgcgtctagggtggggaggggacgctagtgtggagagaggcacctttttgtcaaagaacatgggtgattttcatttttgtccttaaaaatagccaggctaactgggccgttgtgacaagcacggactgtgattggctgcagcaggaggtggggagtccctgggctggcggccgagtctggatgaggttgtttaacagagatgcagacccaggaagagagcctgcatgcatccctttccccagacagacacagatgtggccaagcttggcggccctgggtcctctctgggaagcacaggcgaaggagctctggggcaggtcctgctgcagcccgggccctctgtgtcctccagaaagccgtgcccacaccggccctcccctccagctgtagactcagggctgcccgcccctgtggtgccctttacagcaaagtgcaacctcagcatttttcctactcctgctgcttgccttttagttcctcctcatccatcacctggcagggaatcggagcagagccgggagaggaggggagaggcgtgtcttttgtgttcttctaccttccctcttttccttttccttctgcctctggttccatcctttcttgactttcactgatcattaaaacataaattcctggctggctctctcagcttagccagcagcccagctgtttggggacttcccatcaggatcctactgggaatgagacactgagccaggctgaaacccccaaagctcaggcaggaaggcagcaaaacaagcctggaggagaccatcccttgccctgtgtctccaccagccagagaaagctctacccttttcctccacactcgtcttgccttaaaaatgtgttggaacttttctaggtggataccccaaagaataaacagggactcagagggatcgttgtacactcatattcaaagcagcattattcacaacagcaaaaggtgcaaacaacccaaatgcccatcagtggatgaatggataaataaaatatggtctagatatgcagtgtactattgtgatacgatgtcttattcagccataaaggggcatgaaattctgatacatgttacaatgtagataaaccttgaaagcattatgctaagtgaaataaatcggttgtaaaaggacaaatattgcatgattcctcttataggaggtacctggaataggcaaattcatagagagaagggtgaggaagagttcattgtttagtgggcacagagtttctgtttgggttgataaaaaagttctggaaatagatagtgatgatggctcaaaacactatgaatgtacttaaagccactgaattatgtgttcaaaaatggttaagattataaggttttgatttgtttgttttgtttggtttggttggttggttgttttttttgttgttgttgttttgttttgttttgtttttgctttcagacagaaactcactctgtcacccagactggagtgcagcaacacgatcatagctcactgtaacctcaaactcctgggctcaagcaatcctcctgcctcagcctcctgagtagctgagcatgtgcgaccatgctcagctaatttttaaaaaaatttttggaaagacgaggtcttgctatgttgcctaggctggtatcaaattcctggcttcaagtgatcctcctgcctcagcctcccaaagggctgggattacaggcatgagccactgcacccagctgaatgctgttttatgttgtgtatatttgaccataataaaaaattgggggcctaagtgccgggctgtacttccaggctgagagctgtggaggtggacgggcagaggagggccatgctctctccctctctctgctccttcttctcttgtgactgagatgaagcttggggcttttctgctttgcatgttccccgcttttctgaagctggggcctccccactccctctctgggccccgctgcggaacagggaagtgatgtattctcctgttccccctggaaaacgagagttcctggaggagctgaaatccctgggagagagtgaaaaggaggggaggaccgacaagtgaggggggctagggatctggcggccactgtgggccacggggctcaccccactcggagttgctgagggaccacgtggagcatgcctggaattgtctgagacactgaaaaggggagtatttgtcccattgagggcagccgcatggggcgctagctcctcatactccgggttgcaggtgccaggggccgggggcttcctgcaggcatctcctgactgcagaggaagcctggacaggagaccccggggcagctgaggtgaggcgccgctgggctaccccatgtgaatctggctgggcagcaaacactagagtagaaggaatggccgagaggacgtgaggacacaagaggcacccgcagagcgagtcctcttccttcctcggggcaccaaaaggctgcaggtttgggatgggtctcaattctgtcccctttctcagcaactattatgggtttggggtgatgaccatgcccaggctccctcatgggaccctgacacagccctgagacactcgggcatgtttgggagagccccgcagagccggccagaggctgctgctgcaggcagagcctggcactcaatcctcctggaaacggctccgtgtagagttcctgcaaaacccggttctccgactgcacctgttaggtgtgccagggagcccttgataagatctgacgtcttccaggaataatgggcgtggccttgtgtattgacttctcctgcaggtggctccttttcagccctctctggacatcggcggttttattcccatccagcggaggccagcttcccggggccaggcacggagcctgcttggggccagctctccggaacctgtgcccagctggggaataagcacatgctcagcacttgaagaattcactgctcactggcgagtcagtatggaattggggaacttggaggtggcctgagggactgagcaggccaccaggagtggggatggagagaaggcagttggggtataggcatagtcgtgcagacctggaactctcctgtgtgaacttgggcaagttacttaatctctctgaacctccgttttctcttctaagtagcataattatgccgattccatagggttgctgcgaaggtgaagtgagtggaggcagatcaagtgctgacgtgtctgggacatgacaaaggcacagcagacactcgtcattcctactattagcagaaattgcagcattcatacccatagccaaccctgggtgaatcttttgcttagtagcctgccatgaaaccaaggcaatgctctggccttctgtgcatataaggacctctagatttggcaggtggagggaaggagaaaatgcttccaggtgacaggttcagtgtgagcaaaagcacagaggcaggaaagagcgtcctgtgttcattttctattgcttcctaaaagtttactacaaacagcagcataaaacaatagcattcattatctcacagttctgtaagtcagaagtctggcacagcgtctcatgagactgaagtcaagttgttagccaagttgaattcttagctggaggctctgggggaaaagtctgcttccaggctcattggttctcagatgaatttacttcattgcagatgtaggatgaggtgcccacttccttgccagttgttgaccagggattgctctcaactactagaggctgcccacatgccttaccatgtgtctcttttccttcaagccagcaacagtgcattgagtctttctcatgctttggatctctggcttcttctgctgtgctgagctctagtcccagatttaatgggctcaagtgcttgggtcaggccctcctgaatagtctctctatcttaaagtcgactaatttgggatttaattttgtctgcaaaatcccttcccaagggtatctagactcctggagagtaactgggagagggtgtatacccatgactgtcttagaattctgtctgccacacctagcatgtgcccaggatgaggagcagagtagccaggggctgaagcaggggatgacttaggtgtgggcagctgtggagcaggaggagtaaggtgggtgctggtggtgtggggaggtataaggtcctgtaggctttgagtggcaggtgcaggaagaggcaatggacagtacctcccatgcccctgcctgtggcccttgccaccagatgtgcatagcccaatcccagctgactccctgaggacctgctgccacccttgcctccacatctggttccctcattctgaaaagggcaccgccttggcctgaaacctccagtccgctgattcctccctctaggatgggtgaacagacccacagctccaaggttgctgagctcaggggcccagagcgaggccctgcagcacctcagagctccctgcagcaggcctggggtccgagggaggctgggccccttgcagcggccaaaagcctaaaaatgagctgggaaagcagaggaagatgtgtgcacagcagggcggttctccttcccccgggcagttcttcctctccattccctcaccctcggagaaggcagtgagggtgtgggagagtcaacattcatgctctcagcagcatttctggaacccagcacaccattccttgccctgctttggactcgctgcagtgaaaacactcaacaaaccctagattattggcaaataactgtgttccaaagaagttctcagggttaaggttctgaggttcaaagttttgaaattcaaatgctccattaaacctgctaggacctcgcctttattactggcagcagcattcacgctgctctatatggcttcagagccctgtgtgtgcaggattcatgtcttctctgtgctttcttgtggtagtggtttggtagaagtctgttctactagttgtgatactaaaagcatgtgcagactctgttttctctggcagatcaggatcttccatggaaatcacaggtctccagataataaaagaggcacaaggcaagctttaaatccccttcccatctagcctggagcccatcagaggaaggggagggtccctggcctggaggtgagaaaggttctagctttcctcactcccaggtgggtcaggtgggagcttcgggggataagcaagggagcggggagcagagagggcggtggcggtgaggtcccagcagacctgggcccctgcagggctgggttgagcacatcagctccagagattgcagttctgttggtggactttaactagtgttccagccatagctggtcatctatgccgcgctgccccagagagagggcgcgagggctaatgggttagtcatgcccctgtaaaggtgaccaggcagtgtctgtggctaggccatatcagcatagacaatgcagcaagcctttctcgttctgccagtgaaatccagtcacgttcctgcagactcaccataggtgtgttccagtagctgcaccagagcaaggctgcaaaatcctgcttataagttacggcccataggcttcaactaatttaggggacagtctggtgactgaaaagaaaaagtctcctcttaagtagtcattttcttggaggacctgagcccctcagaggtttgtgtctcgggccccattgtgcaccctcaatcttggttctgttgtttatttcatcctgctttgtggtagattctgttaaatctgagtcaggaagtgaggcttggcctgtaggctgagctcatcttctgcctttcccagcgattaaggcctaggtagacactaactctgacactgcacagtgcctgtgctggccaatcagacaagtggcctgcattccctgggcctcagtctcctgccctacacagtgggaattacagcacatagtttatgctgagggcaagccagcccctcgctgacttctcagggttgttggaagaacagaacgccatgatggataagaagatgcttccaggagcagagggtgtttctcaggtgtgggcatcgtcgtctcctccagcagcgtctcacggagttctctgtcctctttcccaccagtcccggcccaggcccctgagctggagggatggaaaactcctctgcagcatcagcctcctcggaggcagggagcagccgctcccaggagatcgaggagctggagcgcttcatcgacagctacgtgctggagtaccaggtgcaggggctgctggctgacaagacggagggtgatggcgagagcgagaggacccagtcccacatctcccaggtgagcgcgggcccggggttggggcagcttgggaaattcagagggggtgatgcaggagcccctaattctgggcagcatccagttgcctgacactagaccgccaaggcatgaatggtcccacccagcagagcacccagaatctggcaggtgggctttgggatccaggcaggaagtgccctggctgtgcaccccgtccctctaacccacctccactcctccctatccaatgaggctttgaggcccagccaggcccacatgtctttgaacatacgtctcttgagtactgactatgtgctgaacgctgttccctgtcctcaataagcttatgttctaggagagatctggaggtttcgcttctccataatgcataccatcaaagaactataacttgtgaatattttctgtgatttcaaatacaagtagttgttggtagccaaaggaatgattgttagtagccaaagtctcgtgggattctcacccagggctctgtatgtcagacatacttagacatatgaggcaatccaaccagcgtcatgtttggtcctgcaccctcctgcctcagtctgtggcatccctgaccttggaggggagatggactcatctgaaagattgtgagctgagatttgaaagtcttggcttctccctcataaagtatgaatgcattaaggatagggaccctatcaagcatatctttgcctaacaccacaaatcctcagcagatttttgttcaagagctgcttccagattggcttctagctgccagtgtgaccttgggcagaaccttcaatgtctgtggggctgtgttttcttatctggcaaatgggaattatgctgttgcctcgggaatgttggaaggtcaaagacagtaagaagtacaaaagctgcagagaatcagtgctgcctgcacaagcatgtacaggagagtcccctgtcttatctggagtcagggttctggggatccgcctctcgtgcgtgttatcccatctccaagcctgggactcctgggacaatcagaaggtgagctacctgggtgcaccctgctttgggaaaaggctgagtccaaccacctggctcactttttgggtgggacccctagctttttagaagccagaacaaacttttggctttgctggaactcagaccaggagtcactctgggaaatgctgaagccacagtaatcccatgccctgtccccactgggaagcaggggacagaaaatagtcctgagggagaaaaaaaaaaatagatgtgatgctttctttagtgtccttgaggttctaaaatcacaagtaatgcaagcttataatttgtttgttattcaatccatgagtgtttaacaagcttctattctgtgccaggcactattctaggactcgtatctaggattgagcaaaaaagccctgccctcatggactgtgtattctactcgtggatgatcattgcgatggagaaaagtaaagcggcaaatggaacggggagtgaggaggagcaggaggggcttgcagttttaagtagcgtagtcagggaagctggcatggaggggagggaggggtgggtagtggagatatccggataggaacatctgggcagaaggaccagcctgtgccagggctgggctggaagaagagtccgggcccagccaggaggccagggtgctggagcagaggatgagggagggagagctgcggagatgagtcagagggatgatgaggactgtgtcgtcaggaggtgcgagtcctgagccctggagtggccccacatgaggaagaaagaatgtgaggagaagtgagcctagagaccagtgaggcaggagggaaccaggctgctcctggagcccaggaggggagtcgagggagtgggatggggagactgccttgcgggccactgccaggccaggtaagaggggctgagaatggctgactgagcagggggccgtgacggggaagtttccactgagcggtgaaggcagaagcctgcctgtggccagctcaaggaacagaaggagatggcctggagactaggagaatagtacaactgttttgaggagtttagctgtaaaggggagagacatgtggtggtatttgggggaaataaggtcaaaataggagcattgacctgtgtgttcaatccaggggcaagtcaggggttgctggagccctggcctatccccagcccccagcggttcatccacaatgacaggagggagtggcaggtgtggggccgcgcatctaaaatggctcctgcagcacagctgtggtttctctccagctgcttgcggccacgaaggtgcagaggcagagttacaaagatgactttaaccagggtggaggtttctccagggaatacagtggaggagagaggggtgagggaggcacaggagtgatgatggtgagtcacctggatgctgagccaggccaggacgggagtgggtacctgaggtggttgtggaggctgacaggtggtagggtcagtggattggaggccacccaaagaattgtaatcctggtagcaaagagactgagctagaaagatggtgggggtgtggcgtgtgtccaggagtggggtgtttgaaatcagaggtggaggaatgcagtcatgggtcaggagagggctgggtgtgagcatgggagtgtgtgggggagagggagaggccaggaggagagcgggtcgtgaaactcagatccatcttcatggatcttgaaatcaccaagaaaggacaaaaggatgtgggaaagggtggctgtgatacaggagaaaagtccttgaggaatgtgggagcaaggtggtggctgggtggcctggcggtctacagctgaccgcatggagggtcttgtctggtggtgcattaacttatttgcataatcctttttttaatatacaaactatgcttattgcacagctaatagtaccatgatctgaagtggaaggaggaggaggattaggatagattggaaaattgtaagggaaattaacctctttagattgtctagggcaggaactaagtgaaccaacttttgcagtcccctggaagcccctagagctgacttccccaggagcagggcctgtggatgggcatatgggctggctgggtaccccctgttgtgggctgcctgccttttcagctgtgtggcatccaggcctgcagcagggcatcctccaaaggttcctccagctgaaatttgctctacctggaggagccaaggaagcctcaaagcttcaccccagaggtatgcgtggctgatggtagaatttctgtgcccagagcagccagcggggacatagttttgaaaggaggtgccctcccagcgctttcagtctgggctctgtgcttctggcaccagctccagggatcagtggggcctgactcacgcttggatgcccccatctgtgtggcgggcaaggcaaggctgtggaggggctttcagactgacgtctgctgtgaagtgtggtgtggagaacacctgtgtggtgtgacatttggatgcattctctaaactttcttcatgctctggaattccctcgaagaatgcagacacctggcaggatgctggggcctgcaggcctgcctgctgctgccggaaagggaggatgtttcaatcctgcccctaccgcgcccctgcctccccgatccccacagtcacacacacacctggggtaccgactctggaagagggacggctgtggcccactctcaggaaggccagggttagctgtgtctacataagatactttttaaaaaaattctctattaacacagctttatgggaaatatttctgctaaagcactttggcttgtttttttttttaatctgatgactagtttaaatggaagccaaaaagaaaaaaaaaaacagcaaacactcagggaatgttcctgtctgcctgtgtggtattttgatgtttctggggaggaaatttgttaagaagcttggaaaccttgagaagacctgagggagtggagaggaatgttgctcttcagctggtgaggtcattttttaggatctgagaagtgacagttgacactcagggagaaaatatctcatgatgtttgtacacttgtgttcctctcgtccttcccagtaacaactagaaagaaatgaaggatggatggatggatggatggatggatggctggctggctggatggatggatagacagacagatagataatacatagataatagatagataagatagatagatagatcagttttcctgtctcttagatgaataaccaagacaatgtgtgttttaagtttgccaacattttctggatgccatgtttaacatcatacctctccccatgcttgacaccacgcccctccccatgtttgacaccacgcccctccccatgcttgacaccacacccctccccatgcttgacaccacgcccctccccatgcttgacaccacgcccctcccccgtattttacatcgtacccctcccccatgtttcaggagcacctgctgtccaatagattggaagtccccacagtcactctatccttgggaggaggagggattttagccctattctaaaggagggaaactgaggcacagaaatggagcatggccaaaccccactgctgggtggtggctgagctgggctctggagccccatccccaccccacctacttctggtttcctgctccgtacaggccatgactgattgggtgttgggtggttaatatagatttctttcctatagaaagaaaattaggtctccaaatctcattgaccactaatcttttggggaagagattaggatgttgtaagtggggaaaattttggcacatgtgatgttcgtggatgatctagtggatcaccagaaagcttggaagcagtatgcaactctgagcgagcatgaactcacttagggagctgtgagaaatactgatgtacaggccccactgctagagatgcaggcaaaggtgaggggcctgggcctgaactattcataagcctgtgcatgactctgattgccacagtgggagcagggctgtctcctttctccccctccatggcctgctgccccgatccagtctcttggaaagataacatgtaggaaccctatgaagatacatttaatgacagcatagtttccagtaaattcttgttaaggggtcaaattaagagccagtgagagtgaagatcacttcctatagccctattttgatgctttccggcacttggaaaccctgggtttcatctaaaatgcagtgatctttacaaaggggtgcagcagtggcaatgaataggatagggtgagagtgttcagatcggctcaatggcttttcctaacaagtttctcctctttctctttacgtttctcctttcattctgccttccctgttcactgttccctcgccctttttctaaaatcccatctcttcatttccttctgcccttaaattcatttttcctgatgtctttgctcacaggaggaagtactcaatggtggaccacccatgaaaggcttaacagaagaagtgagtttataggaggactgcggggtggttcagcatgggggatttattatatattttccccttatttaaaaaatgtattctaaattatacaagtactttatgcatacattcccatagtgcacaagaattcagatattaataattaaattctcctgagctaaaattattttaaattatacaagtcctttatgcatacattatcatggtacataagaattcaaatattaacaataaaatcttctgtgctaccacctcattctgctcccttactcctacctcccatcagatgagtgagttcatttccttgccttttttaatgcctttcctgacataggtatgacttgaagaaatacaatattgtcaaatcatatatcatagccagtggatatattgttcaataacttgcatttttcacctgcccacatgccccagagattcttctgggcttgcacatctgctgtgttccgtttagtggctgcccagttgtccatagcatggatttatttaaccatttgcttaatggtaggcactcaggttacttctaaattttcccctggaaatacgtgatacttcaacacatactgttgaacatgcctccttctgcacaaataatggagtttctttagttagatgctgagaagtaaaattaattttaatagctgttgttaaagtgctctccaaagatcttccattatccatactgccaccagtgtattgggacatcttgtcattttaattcacattgtcttatttctttttctttcttttttttttttttttttttttgagatggagtctcactctgtcaccaaggctgtagtgtagtggcgcgatctcagctcactgcaacctccccccaccgcaggttcaagcaactctcctgtcagcctcccgagtagctgggactacaggcacatgtcaccacacctggctaattttcgtatttttagtaaagatggggtttcaccatattgatcaggttggtcttgaactcctgacccaggtgatccacctgcctcgggctcctaaagtgctgggattacaggcgtgagccaccgcgcccggccacattgtctttatttctaatgaaattgaattaccaatctttttattttctttttttctttttttttgagatgagtcttgcactatcgcccgggctagattgccatggcatgctctcggctcactgcaacctctgcctcccaggttcaagtgattctcctgcctcagcctcccaaatagctgggattacaggcgtgtgctaccacgcctggctaattttttgtatttttagtagagacggagtttcactatgttggccaggctggtgtcgaatgcctgacttgtgatccactcgccttggcctcccaaagtgctgggattacagtcatgagccaccacacctggccgttttttttttgtttttttttttttttttttgagacaaagttttgctcttgttgccgaggctggagtgcaatggtgtgatcttgactcactgcaacctctgcctcccgggttcaagcgattctcctgcctcagcctcccgagtagctgtgattacaggtgcctgccaccatgcctggctaattttttgtatttttagtaaagacagggtttcaccattttggccagacttgtcttgaactcctgacctcaggtgatccaccctgctcggcctcccaaagtgttgggattacaggcgtgagccactgtgcctggccaccaattactttttaataggataaaattttattttctcaaagtaacaattggaaaaacagaggcaagtgaaaaatggaaaaaaatcattttatggcaactaatataatttttgtgcatcattttttaaacatcttttacaaagttgtacttctagcatacatgtaagttttatgatctgtaggttttaatgatctcctagacattgtttggtggtggtttttagcataaagtgtaactatttaaatttgctctttttctgctaggtggtaaaatataatagaatgaaagctaacatttattcattcaggctcttttgtaggctcagggggcaaagtcaagaacaaaacaaccatgatctctgtctcagtttctcacagggaaagacagacaatagagggagaaggaaatgggatgttagaaggtgatgaatgcatgagggaggcaggaagtgagtggggaaggctcgcttaggagtgaggatttgggcaaggtgactcacgcctgtaatcccagcactttagaaatctgagacaggtggatcacttgagcccaggagttcgaggccagcctgggcaacatggtgaaactcagtctctactataaatacaaaaattagctgggcatgatggtgcatgcctgtgatcccagctactggggaggctgaggtgggaggatcacctgagcccaggacccagaggttgcagtgagctgagatcacaccccttcactccagcctgggcaagagagtgagaccctgtctcaaaacaaacaaacaaaaaacagaaagaaagaaaaagaaagaagacagggttgggggggagggtggggaggaaggaagggagggagggagggagtgaggatttgaaggaggtgagagtgaggccacctgggaaagggtatccaggcagagggagtggccagggcaaaactctggtgtggggcataccacacagtcaaacgggatccctctgaatgctatgtagagaataggctatggtagggggtcagcaagagaggaagcagagaccaggaagccgtctccttgctgcaggggagaggcaatggagactggggccgtgtggtcactggaggtgatgagatgccttcagagtctaggtatgcttggaaagtgctgacactgtgattgaccctgaagattttagcctgagcaaataggatagactttgcagaaatgagctatgcaagaccctggaagagcagctctggggggcaaaggtcaagagtcccgtttgggcatgaaaggtttaagatagtattagtcaccttagaggagatgttggtccaccagttcgatgcacattggtggtgttcagaggaggataatgagctgggtgctgctttaagcccagggggtgaggaagtttacaggagaggatcaaagattgagccttgacttaagaagttggggagatgaggaggaagtaacaaaggagactgtttgcattgtttctcacatgttaactcatttagtcttgaagatgttgttattattaccatcttacaagggaggaaactgaagcacagagaggttgacttaagcttcctgaggccacacagcaagtacatggcaagactggggtttgaaacaggcagcctgtctccacgtaccatccacttatcctctctgctattggtagacctattattattacagatgggggaaacttcgtcctggggatgaagcgatttgcccaaggtcatagagtaagtggcggagctgagatctgaattcaggactctctgcttcaagaactcaagctcctaatcacgcaagcattctctacaacaggaaagttgtttgttccttaaaagatgggagcaaaagcctccctctctctctctcaaatctcagccatcagcagcatcctgtccctcttagcacaggtcttttctaaaatatcactggatagagaatgagctgccagccagccttgggtcccacatcagggtcttggttctcctccccatgtcagtaagcccatgtgcccaggagaaaggaagatgtcatgcacactcctgtctttgagaagttgggtcttcaggctagcaggattctgactggggtctgtgagactgggaggaagccatttcccttcagcctcaagtctcccttcagggaaatgaaggcattggtgagagccctggttgcattgtgcagcccccacctggcacaggttttacacacagaggtcacattccaccaccacctatgcattcagacactggggaagacctggcctgtggacccccaaaatcccccctgggtgtctgacgccaccctcggttaagaagccctgggtaagatgacctttaaaataactatgcattttgaaataatttcaaatatacatagaaattacaataatagtgcaaacaattcttgcatatccgattaacatcttactacatttgtacccacactctctctctaaatatatcttatgatatatataatttatacatataattgtatgtaaaacttctttctaaatcatttgagagttagttccagacatgatgcccctgtatcccttgacactccagtgtgtatttcctcagaacaaggacatgatacagtataggaaatgaacattgatagaatgctgtgattaaacctacagctctttcagcaattttcccagtaatattgtttagagcaaaaaaaaaaaaaaattggctgtgatctttgtctaatccaagatgacatattgtgtttaatatcagtcatttttcctgggtctttgaatgatccctatttctgtcctttgctcatgctgccactttttggctgtgtattcctgggtgagttacttaaccacactgtgcttcagtctccatgtttgctaattagagaaggtaagagtgcctcagcagccatgaagagtaaatgttagtaagtgcaatggacttagaacagtgcctagatttaagagaagtctttatatagtctggtgattaattctttgctacacagcaggctccccttatccactgttttgctttccatggttttagttacccacggtcaactacagtccaaaaatgtcaaatgaaaaattccagaaataaacaatttatacattttaaattgtatggcattccaagcagtatgatgaaatctcatgctgtctctcccgggacatgaatcatccctttgtccagcgtttctaggctgtatcctctacctgcgcgtcactgcccagcccagagtcactgagcagacatctctgttacaggatcacaaacagatgtagggctttttaccacccacggtttcaggcatccactagggaatcttggaatggatccctcagggttgggggggtgggcgactgtgcatgttgcaagtagcttctcacttgtctttatttgttcatgatttcttttgtcgcttagaagtttgaaattttgatgtagtttaaaatttgcatctcagatttcaatcaccttggaatgtgttttccaagaatagtgcaaggcagatatctaaggtcaatttttcaatggctgggtggttgtctcaataccatgtatttattgatgagtctctccctcaattcaaaacacaatccttacctatatgaggttcccatttgtacattaatttgcttgtgggtgcagttttatcagttgatctgctcttttattcctgtactggttcaacagcttttttgtctctagctttttttttttttttaattaatttatttattttgagttggagtctcgctctgttgcccaggctggagtgcggtggcgcgatctctgcttactgcaagctctgcctcccgagttcatgccattctcctgcctcagcctcccaagtagctgggactacaggtgcctgcaaccacgcctggctaatttttttgtattttttagtagagacggggtttcaccgtgttagccaggatggtcttgatctcctgaactcgtgatccaccctcctcagcctcccaaagtgctgggattacaggcatgagccaccgcacccagcccgggctctagctttatgagatactttgatatctggtagggctggtctcttggaggagttttaggcaccactgaaatgggggcctggtctagctttagcacctccagcctcccacactctgagcttcttgcttctctctcctcctcctccaatgctcagtaccctggggtctccccaatctttcccaatctctgctcataaaacactggccgggtgtggtggctcccacctgtaatcctagcacttgggaggccaaggcaggtggatcacctgagctcaggagtttgagaccatccagggcaacatggtgaaaccctgtctctactaaaaatacaaaaaaattaaccgggtgtggtggagaacgcctgtagtcccagctacttgggaggctgaggcaggagaattgcttgagccccagaggggaaggttgcagtgagccaagattgtgccactgcactccagcttgggccagagtgagactccgtctcaaaaacaagacaaacaaacaataaaacactcttcatcctgggatgtaaagacaaatagcttattttcattgttttttattgtgaaatacttaagatggactgataacagagaataataaaatgcacatctattttgagtggagaacaaacacctgtactctcatgtttattaagtcttaaccctgtgtcatgtttgttccaggtttttaaattaagacacgaattttaatagctgtggttgaggcctttaaaccactcttgtgaatttgatgctcatcgttcccatatctaacaaacttcccacgtttcccgcctttctgtttgatgaccttttcaagtaagacaccacctttacccccaagagaacttaaaggttcaggaggctcaaagctgtaagcctgtttgccttgaaagggaaatgtgtgggatttcaagccctggcccggactgaggagcgggtctggagaggtggacccttcttcattcttgactcatctcctatatatcaggacaggttctggggaggtccatttctggagattttctaggcggtgtctcagagaaggcaaacgggaggcaggaggtggtggtgcctgtgccacaagaagctggtgttgagagcagaatcccagcagggatggggaggaacttcggaatagggaagggagggctaccagagggcctttagggccagggaagaagcgtgtctctgatggaggggattcaggcagtagccctggacaggttgcctctggggctactgctgggctggggtttgagatggagccccacaagcccagtgggtagagcttgctgtgctaagtgtgatcattcacacttcactcctccccatttacacagtcacacgcagggccacagtccctcctcctgctgggggttgtgcccgcctccggctttgttgggtctctggaatgaggctctgtggactccaccatcttgctggctttcttgtgcacagatcacccgctttgcctgctgctcatctgttccacactctgagatccactgcttcatttccatctctaccaccactgctaatgaaccccaatgtgggaccctccttccccacttcccccctgggccagttcagcctcccctaacagaagccttcaacccctgcatatggaggaagtgtctctgagttctttagcctgacagccgccatctgccctaagctggccacgttctactgagcctgttgcccctcttgggcacctcactcttctctgggaaccctgggttgcctgcttttcctcccttacagcccctgccgagagcacactcttcttcatctcagccgtgccgtccccacccccctctcattgctgttatttgacatgtcatctgacctctcctgtgtggggacactctttgttgagggccccacacagaaggcactcaggaagtgacttttggttggcaaatgtacagttatggatggccttggacaaggcagagcagtctcgttggagcttggaaagctcaccaaggagggtagggttgcatacggatgtgcacgaagcctcagggtctgatttgtgcgtgcccatcaggaggccccatcctgccaaggcccgtgctgaccctggagaaggtgtgtcccccgtgagtcaccgtgccgtggaatatcacaccagcactacgcagctggggttaaaatgttcaggatgcctggaaggggagaagcctttttctgagaggtcacctaggatgggatgaggagtgcaagcatggcctcatgttccctccagccagtgggcactgtgtgccttggatgtctcccacctgtcagccaggctccaaccagggaagcagaaactactccaatatataaagcagagggattatagttacagtactttaaacattatacatacgtatgtatatacatatacatatgtttatgtgtatctgtatacattattctaaaaatgtggactggacatggtggcttatgcctgtatcccagcactgtgggaagccaaggtgggtggatcacctgaggtcaggagtttgaaaccaggctggccaacatggtgaaaccccatctctactaaaaatacaacaattagttgggcgtggtggcgggcacctgtaatcccagctactcaggaggctgaggcaagagaatcgcttgaacctgggaggtggaggttgcagggaaccaagattgcgccactgcactccagcctgggcgacagaatgagcctccatctcaataaataaataaataaataaataaataaataaataaatgtacatatatacttatagttatgtatgcatgtattttacgtatgtatgaatacatacatattagtttttgttttggaattattttagacttatagccaaggtgcagaatggaacagggtgttcccaaacacttgtcactcaccttgccgtaatatgaacaccttacataactatagaaccattatcagaagcaggaaattaacattggtacaatgctcttaactagaggctttattcagatttcaccagttgttccacgaacgtccttttcctgttccaggatccaaatttgcatgtaattgccacatctcctctttcccttccaatctgatattttgtcttctcttttcttttacaaccttgacacttttgaagagttctggtcaatgcttctgtagaaagctcattaatttgggtggcgtgatgttttctcatgattatgtcgagagggtgcattttgtcaagaataccccagaagtgatgtgcccgtctcgatgcaccacactggggagtccatgatgcagatatgttttgttactggtgatattaaccttgatcacttggctaaagtggcatctgatggtttctcatttttctctccccactgacagccacaattaataaatatcttgggggaaatactttgagactgcaatgatccaagcagagggaatttaatacaaagaattgattactcctacctgagaagctccacagcccagaaaatggcaacctcaggtagctagtaccaactcttgacctgaggctcaaagaaagaaggtgttgccagagtccagggttcccggtcatgcatagaagcctgtctggtgaggctggagccaggaaggagacccaggcactgctggtaatgctgcctgaggcatagagagatgggagaaatgccctcttcctgtctcccattggccaagcccagccagaagccagctgacgtgggagcctgggaattgtggtccgcaggggtcagcccctctgcagtatagtggggatgggcaaggagtgcctctgacaccgttgccacttctctagggctccactgacccttatggtagccacaggccacgcatggctcttgaaatgtggctcatccaaactgaggtgtgctctaagtggatttctaacacggaatggaaagaagaatgtaaaatatctcattaacaacttttcatattgattacctgttgaagtgataatattttgatgtattagattaaatataatatattatttcatttaattttacctgtttcttttaaaaatttggctactagaaaatttaaaattccgcctgtggtttctatgtgtggctctcattttgtttcagttggatagtgctgctctagggtacacttctacccagcctatgtcaacaacattgtaagaataacatccatcctggacaaaggtcatacccttgagccatgctcaggagggcatgtccagccaaggttttagaaagccaggactgcactggcacacactcacagctctgaccatgtcatcaaacatacagagactgggcttccctctgctttttcttttttttctttttctttcttttttttctttttttttttttttttttgaggctcactctgtcacccaagagcattgtgcattggcacgaccacagctcactgcaaccttaaattcctgggcttaagcaatcctccagcctcagcctcccaagtagctaggacagcaggtgcatgccaccatagctggctagtttttgcttttgttttagtagggacaaggtgtctctatgttgcccaggctggtctcagactcctgggttcaagtgatctcctgtcttggcctcccaaagtgctggattataggtgtgagctgcctggccctcctctgctctttatgtatcatgcagggtgtaggttaaggtcaatattcaacaacttcagctccggaggctacctaatgtttaatacaatagtaaaaacactatcatatacctggatagcatttgacaggaagggctatatgactgctactgcattgtatctatacagtgtttttatagctcacaaaggtctttcatcccagcctcccagccagtcacccagcatggctctcctcattttatagatgacagaatgaagcctgagagatcacatggatttctgtggctcccagactcccaatgcatcccttggggagctcgtcaaaatgctgatcctctggccctggcctcacagagtctaattcagtgggtaaagcctggggcccagggacctccatgttgcagactctggggactctcgtgcagatggttgtcagaccacactttgggacacagcagccctctgagttctcaggggatgtgagtggcagggcttgtctgagccatgcttctaatagccaggttgggctctttcctggtgccaaacccatcatcttttggagctaggcttctaggaagaccaatacatacctgcctcactgccatctctggccacacccgtgatgtaatagagggttagtgtggctgaagccaggtcaggcggtcaaacatggtgctggttgtaccaaactcagaataagttttgtcatatctggctgactttgggatatagccagtctttgtcactgtgctgggctcaggtgaagggaagtgagtttgcctcccccaagcggacaccaaagcttcatcttgatgtggagcttgatgatgccaaattgggtctgatggttgagaaagatttgcattgaaatggccaaataggattccacagtcatgctaatggggaaggccagggcacaactcctgcagcctggcagagtgagcatgggcctggctgtcctgccgtcactgatcgctcctttctgttctgcagtggacagcggactgcagcgaaccgctggacagcagctgttccttctcccgagggcgagcccccccacagcaggtagggaaccagctctgcgctctgtctgggggtgtcctatgtcttgtctgcctgggttcctgggccggcccacagtggctcctgaggagtggtgacatggagagtgcagagaggtgggagaggggagggggcatctgttccctggaaagccctccctaactccctgcccacagggaagctcccactcccccaaactcatcgattgatgagatttctttttagtagctgcgttctatatattaacacatatctggaagcagcccagatgttcactgaggggaatggagaggtgccttgggatccatccttacagtggaatattacacggctctcaaatgactgcactgagggttcaggtaccgacattgcagccccacaaacaatgggactcggcattttgatgctggtgggtgctttggatatcacttctgctccagatctgcagaaggcctgggaggggcagcctgtgggggagctgtcagagacctgtccatccccccagccaaccaacagtcctgggaccccgccagagcctgccacctttctccctgctgcttgcggtgaggtcctgagaggcttgtgggtgggttgcatggctgggagggaagggaggcagctgctgctctttgagagctgccctggtgaccccctggccctccaccaaaccctatggtggtccagctgttctcactgatacctcatccctgcctgcaggagcctgtgggattagaggctgaaaaaaacatgtgtccccatcccgagtccagcctccgactatgcctgtctggaaagcggagggagcccctgcaggctcctgcgaggggccatgcctggtttcagagccgctgcagtcatgggttgccctgggcctgcttgctcatgttcagcttcagtccacttaatcatgttcagcttcggtctcctggcagattcacccaactcctctattctgtcccgagagaagctggtcagtggccttggttctagatctttcttaggctgtagggcgtggctgccccatggtgtggagggacggctgcccaggatggttctttcacgtgacaaaatgtgcttgtacgtcttgtttcttaagaaggaggccataataagagccccgggggtggggggtgatgggagacctggagtctcgtttttgttctgccgcaaacttggtggcaaactcttccttcttgggtctcagcttcctcacataaaacccagaaggagcctcgacggcctctgagggtccttctaacatctccgtgccatttgcagatgaggaaactgagtcccacggaggtgccacttgtctgccctcctccccatacggcactgctaccttgcccaactgcaggaggtggccttctagggggtgcctctgtctctgctgcctccctgcctgggaccccatgttatgctccctgaccccctagcttttggtctaggccctgctcctcaggggcactgtctctagctcctgccagttattctggggtctcctaaaaggagattcccctcactcttcagcagcaatggtgaacttggatttggggactcaagcaccagagagaggctttcaggaagtgcttgaagctcttggatgggaaataagaggtttgtcactgagagctctctgctgtttggtcagcaggtgtctggttctggaatgttccaatgaagagtcctttttcctctcctctttaccatctttctgggggcttgtctgctgtctttcccctctggtccccttctccacatcactcctgatagggtctccaggggttcaggaagtgttctaccccctttctcccctcatctgcctcacctcccgcacccagctgtcctctcgggtctgccttccccacctgcaggaggtcatgtaggggttcgccagataatatgggcccatggagcagggctgggggcttgtggagtggggttaggtatgggcttgtccctgctccaggcaccctaacaccgcaaggagcagctcaccccaatctcaccttcaagaagcagctgagcagttgactcggggtacgcagtgtttgacaaaacgaaatataactcaacttaaaagtgaagttgtgaaaagctcatattaaatcctttcttgacaggtggaactgagacgtagcttcattacaggggaggagcccaaggagggtggaggacagggtctctgcatagaaccccacctaatcacctgacatgcccagaggcaaggttttgtgggagggacctcctacaggccttaggggcactggcattcccatcacccctgacctgcggtggccgactgatcatctcagagggaagagggagagatgtctacttccgagaagtggaagaggggctgggccactgagggacaccccctgccacagacatgtgtgcctggtgccgtgttggtcttgggtgcagagtctgcgacgcccatgcctggagagccggctgggacggaagggaaggctcagtcagaatgctgggtttgcctgagtctggcgtgggatgcaccacctgtgctgtatgaaattgcttacagccacggaaacctctgaaggttggagagggtctttcaggagcgatttcttagaggtttgtcaaccaggagtgtttgcagggacctggtgctgagctcccggtgggcttgaagccagggacctgccttcaagggcgtcactgctaagtgggaaggacaagacacaggtgtaaaaaaatgcaccctgcacggcatgagatggggcccagggggcagcctggagttcagaaacctgggcaggtgcacagaggaggtgagggggagttgcacctcctggatggatggccaaggttcagacctgggtgctgcagggggaggcaggagcatctgtgggcctgaatttacacgaggtctcctgtggttggcagcaccttggttcagtgatgacaggctttatttttagacatcagagactgaatttattaggtacaaacaacagggtggcataaacaagaggaatctttatttttctcttgccaccagcctggatgggcgtttggggctggtgtggtagcccaacagtgtgggggccggctccttgcttctcactgctctaccctctctagagtgttgcccttggccacgtggcccatggtggctcatacccacgtccatgcatctgcccgtggggacacccacctgggtttccttcccaggaaactctgatttctgcccacgaagcagccatctcctgttgccccctactggagggatcaaagctgggcggcttcctttgagtgacggcaccccaaggaaagccccatgtagctggcctgtggcagtgtccttgtcacccctgtcatgcaggggctctctgatggaggaggacccaggcagctgcccactgaagggtgcctttgctgagtgccactctgatgggatgctgctgttcccttcatccttcaaggctcccttcagcctggcccaccagaggcaagagcacaggaccagctctcggggacaccacccatgagcaccccggctggctccttgctgcactcacgcgcccaggcagacaccctcacactgactcatgctgttgccaagctgttccgcgcacacctgcctgtgcctcagccagctggtcaaccctaagacgggagtcagggcgggctctacttcctcaaccacttctggcctagggccttgtactcagtaggcactcaatagtgatgcctgagactgcactgagttggcccaggctcagtctgtgcagtcattccctagtgggcccttttcctcctgccacaccaactttgatgagctttctggggccatcaggatgatgggagaacactgctaacccattttcacccgtggggacaattagtttcagggagaaactgaggctacatggagatgcggtggctggctgctctggtgctcctcttgactgcccacgttggctgcacatgtccaggaaagtagagttggcaggaagatgcagaggtcctgcattctgccaagcaacctctgggtggtgggtcacagaccatgccctgcaccagggcccagggcccagatgtggccccatttgcagattagtcatacactgggatgattgattcatccccagcaggcttccagcctcatcctgtttgttattttagctaatgtcaaaaagaaaaccttgctttttctgaaccctttcagaggcagaaagtgggggcaacctagaagagattgggtcccacgagagaggaggaagagagcccagagagtgtagagcataaaaagggctacagatagttcagaagaggctgaccagctgccggcaactgggattcagctgtatttgggattgcctgacatcctggcatcctcttcccaaaagactcacccatcacctagtcatttagttaggacgtcagacgtttccagctttttattgtaatgggggaaatgtatagggattgttgaaatgagagactgcagcagcagtacattcagaaagcttttcaaggtgttggcatgggatttagaattcaggaaagaaaccaaatgcatgggaaaggttgtatggggtcaggagtgagcagctgttttccatctgcacaggtgtgccaagaacaggaaattaatatgcaccacaacagcacagcctctgattagacttgggaaggacttcccttgacggaaggacttgttggcccaccgtgttggctgttaagcaaggtgatgaaatctttgctaggaacctgatgagcacgactgcctatcaggcaggttcacctgaagccctgggaaagatgggggtgtgtcacaaatgatgactttgagttttgactgagggcctatgatcccaacattccctggaataagtgaagggcactctcttgtttcatcctgacgccctgtagcaaacagaagcataaagagagtcaaagagccttgtcccaagctccaggagaaccagatgttgacccaggagtgacactggctccaagcacctattcagaaaaacaactacacagactccttagagtctctccagaaatctctgtttgcattctgtaactccgtgaaacacccaactggatccaaatcactgccacagcaggtctgggtcttcctaatttctctactgttccccatcccctgatacctttgccaaccttcaggccagctatatgggcaccaacattgactccgacccaggggataacagatggtaggtggaggagaccctcaaatacactaattacctctggccccagaaaaagatggaaggagttttctgcaagtcaacttgctacccttcagtaattataggatttggttctgtgctaatttaaaaaataattagtgcaaatgatatcttagtaaaagtgcctacattttttagcacttccttggatacgtaagaaataccaggtatatgttcatagtgctgctctctgtttagttcgtatttattgagtccctgctgtgagcccagcagatgcgtctgagtgggagcttctggatcactgccagtttgtagggtaaaaactagtttacacagaacaagatgacaacatacacgtaagatccccaaagagatgtcatcctggccacaagaactgtggtgattccaaagagtggttcagttggtctctgtgggtagggaggtgtcttgcaggacatgaggcctgacctatgcctttgggaatgggtaggatgtttgactagatggaagggaagagagaagaagatgaagagagaagacatgatgttagcaaaggttgagtagggcacagtgttgggatgttagagtaatagttaggaggcagcacagctagaggaggatcatattgggtgttactcaagtggggggctgagaatggtgaatgcagaggggtctgtgtgtgggctcagatgttggaacctctgtccaacccagcccctgttgtgtgccttgaacttttttcttgtatctttctctggtgttccatacaggcaaagtctgttcccctgtatcagtcaggatagcctagataatgctgcagtaacaaacaagcccaaatctcagtaacattaacattaaacaaccaacaaccaaacaatccaaatcttagtaacattaaacaaccagggcacagcttggtggggcagttccgttttaaccagttgccatgacagagaaaaaggagctctggaggatcatgcattggcagttcagtgctccagcctagatacaacacttgtcacttccactctgagcttgttacccagaacgggtcatgtggcctcatccaaccataagcacattaagaagtacaacgctactctgtgcctggaatgaggggaaccagaattatttggtgactggctggaatgactgtcacatgccctatctctagtagcagcttcccggaggctggggctgaacttttctttccctcttcttcttcaccacctcaaatccttgatggaactcaaggattaaacttgtgggggcctagggtagcgcttagctctctgaagatttgctgaaaaatcaacttgtaaaaggcagattaataagagaaaaggcatacacatttatttaacatgtatacatgggaggctgcagaatgaagacccaaagatacagggaaaattatctatttttatggttaagttcaacaaagtatggacagttgtagaaatgggattggaccaaaagggcatgatctaatgctaatagacaaaatggggaaacacagcaaggcctgtctgtctagactctccctggcctgtctgtgcagcattccttccttctgagttggggcaggaccctctctggaatgggggtgtcatgacctataatcaaacaaagcagatcagataatttatttatggccagtttttaaaaagaaaggcagagggagaattagagctctatctttaggtttcatggctggctttgggagaaagaggctgtggtttctcgtggtggggaagagggagtctaacttctatggctagcttcaggggagagtgagactgacaggcaggagggcagaaagtcagagaaagacttttgcttctgaggctgctgctgaggccttcattttgggatattgttttctgagccccaacaaactcccatgcactggagtttaaggcctccagtgaattctgaaacatcatgggctctcagatggcaggaagctcagaggtcacctgatccaagtccccaccatgttagcaaaggttgatttccagtagcagggagcatttccagcagcagggagctcactgcttcagaaggcatctcagcatattgttaggcagctccattaataaaaaagttctttctttgattcagccgcaagcccccttctcattgctccagctgacggtttttatttaactcttttgcttgtgtcttttgcctacttactttcctcagcagccgagcacggcaagtctttttaagctaaatatcccctttcctgcatgaggaattgcctttgctgtggttgggtcattcctttgtttatttatttgttctttcacctattgatcggctccaatcagccagtcatcactgagggctgctgtactccaggttgggcactgggcactgggatggtgaggaacatagccatggtggctgtttgcatggagggtagagtggagagaacagatgctgaagctgcagtgagaagatgtctgggacatgacacagtggtccttcgggcctgggtcacatgcccaggagcactagaagtgtgcgctgtgattccccttaacattcctcccagaaacaaacatggcacaacctctgtgctcaccagcgtgtatgtctgtcttccagaaaatgccatctgtccttatcctcaaagtgccttctggctccagctcacttggaggaacaggatgccacacttactaaacaatgctgacaactagctcctatagggagaaccatcagcagccatgcattgggtgcttgctgtatacattctgagccacatggcctggtctctgcactcagggaagctggaatctgcttagggaaataagctattctggaggagatggcagcatgtgagtatggggaggagtaggctggtgtccgcacagggccttgcattgtagcaggagaggtgagacatacaggcaaagtgggagccgccatgatgtcgcggaagcagcattgcacctgggtttaggagatgtgctttcagcctgggctgtgcttccaacttactattggatccaaacttactattggatcgtggataagatacattatctcactgcagcctcagtttctgctctataaaatgaggaggtgaactagatgtaaggccatcaaaatgtcttgttgaaaatatagacctaaacttctgcttctggaaaatgcaatagatgttcttatctatatttctcctgctaaatacaactaaaaacccaagacattctgtataaaatgaacgtaagaagactcggagaggtggagggaagaaggcagacctgctagggtgcccagaacctgaggaacgacacagcgaggagcttgttttctttttgcctcatgtgtcccatacttggcactaggaaatgctaatggacacaggcaaaaaaaaaaaaaaaaaaaaaaaatcccaataaaaagctgctctctacaggaaacggactaagaaaagagaaaaagataggatagagaagaaggaaaatgataggaaaagatctagcaaaacaaaaaacttttcgacagtcactgctgtaccccagccaaacaccacagaacacatccccacccccatccatcccagccaagaccaagtgggagctcagatcccacccctgctgggctatcagaggggctccaaccccctaccagagtagtgtcagagaaggccagtggggagctgtgactttcgtccccgccaactggtgagaaggctcctacccacgccccatggtgtcactggagacagcaggaacctgacttgcacccccactgggcagtatcgaggtgtccctctccttcctgctggggtggtgtcagaaatagtgagtcagacttcatagactcccagggatgatgaggccagccccactgcatgtcagaggggaccacatggggatccggaactcccacctccacccagcggtgacagcaagcacccctgcggcgtcggaggaggttgagtgggcaacctggacttccacttccacctggcaataatgaggctgtcccctgcccttttcccctgccagagtggtaccatgaaacacgagttaaagcaggaggtttaaatatgactctctcatgagctaacatgaaaatgtcctggtttcaattaaaaattgtttgtcatatcacaaacaaactgaaataatcaatggatgttaacactgagatgctaaattggactttatcatcattaaatttttgctctgggaaggaccctattaagaggatgaagagacaagttacagagagggagaaaatatttgcaaaacatatctgacaaagggctcgtatttagaatatataaagaactctcaaaactcatcattaaaaaacaatccaattagaaaatggacaaaataaagtgacatttttcactgaagacgtttttccctgaaggtgatgtacagatggcagataagcacacaaaaaatatgcaacatcattagccatgacggagacgcaaataaaaccccaacaagacatcactatactccaatcagaatggttaaaataattttttttaaagtgacaatgtccacttcaacttggcagcattaaaaaaaaaaagtgacggccaagagcggtggctcatgcctgtaatcttaacactctgggaggccgaggcgggtggattgcctaaggccaggagttcgagaccagcctgggcaacatggtgaaacaccgtctcaacaaaaaatacaagcattagctgggcatagtggcacatacctgtggttccagctgctcggaaggctgaggtaggaggatcacttgagcctgggaggtggaggttgcggtgagctgtgatcaaaccactgtacttcagcctgggtaacagcgagaccctgtctcaaaaaaaaaaaagaaaataaaataaaaacaaaaaggaaagaaaaactaaatgacagcgtccaatgctggtgagaatgcagagaaactggatcactcctgcagtaggagtagggatgtagaatggtatagccattctggaaaacagtttggcagtttcaaaaaaaaaaaaaaaaaaaaaaaacgaaacctgcaagtaccatatgatttgattgagcaattgcactcctgggtgtttatcccagagcaatgaaaacttatgttcacacaaaaacttgtactcaactgtttgtagcagctttgttcacaatacacagaaacctggaagcagctcaggtgatcttcagcagatgaatggttaaacactcagcaatgagaaggaatgaatgcctgatgatgcagcagcctggaggagtctctggaaatcatgctgagtgattttcaaaaagccagtcctccaaagtcgcatactctgcaattccatttatataacattcttgagagggcaaagtaatagaaacggggaagaggtttgtggttgccaggatgagggaaggggtaggggcaggaggaaagtggatgtggctataaggggcagccttgtgatggtgggagtgttctgtgtctccactgtatcaatgttgatacccggagatgctgagttggacttcatcataattaaacttttgctctgggaaggatcgtattaagaggatgaagagacaagttacattgtggcattgaactatactttccccatggagggaaactgcgtatagggcacaagaggtctctttgtattattttttacaagtatgtatgaatctacaaccatctaaaaataaaaagtgtaatttgtaaaaagtataaaaagtgtaatttacaaaatacaaaaagtaatttgtaaaaagtatttctatttcctcagaaccttacatggagattccacatagaaacaggaaagggatagaactgtttttagggggcaaggggaggagccctgcctgctttctcccccacccgcccacctcatggctcttagaacatctctgcaggactcctaggtcaccccccagaccagatgagctctcagcctctcctgtcatgaccttctgtagttctgagtctggtactggcagaaaaggacagaactttggggcctggggagttcaaagaaggcctccctgtgaggcaaccttggaggatgggatggtgttggaatggggggtgttgattttccccatctcctggaagcctttccctggcaggagctggggacagttgaggaggatcccattatttcagcaggttttggacaggcagccagacagaaatggcctctggtgtggccctgtccaggacaggtccatttaaaacctaaatcacaaccttaattagctgagagtgggcagagggttggcctaggagaaatatacttggccacaggcattatcattgtctcctatctctctctggcctttgggtcttaattcaaagaaaaagggagcatgggggaaaagacaggatggacagacagacacagatgtcccagcatgaaaggaatggcctttccctctcccagactcagctttagtgccacccagaaagctgtctctgctgggctctgccctgctgttctcctgcttcaaaggccccttgggggtctatttccccctttcccagctgtgtctggggtgccgtccttcgttctgaacacacacacacacacacacgcacacacacacacaaacacacacatggtgttgccatgataggcctgtttctctttgggttctgccccctgccacctccccctgtgctttccccctcagttgctctctgagaagattcaaccattctcaaagtctgctttagtttgggcctgagaggagtttcagatctggcccataggaagcctctgttttggcccaggagatgagtctggggtcctctggtccagaacatttcatgtaatgtaaaagccctcatggtgtctctcatatattccaatatagagtcaccaatgtagtccatgtagtcgtgggaccagtgaggaaacacaggtccaaaaagccagagtgaggctgggcgtggtggctcacgcctgtgatcccagcactttgggaggctgaggcgggtggatcacctgaggtcaggagttcaagaccagcctggccaacatggtgaaaccctgtctctactaaaaatacaaaaattgctcgtggacccattccaagatggccaaataggaacagctctggtctgcagctcccagcatgattgatgcagaagacaggtgacttctgcatttccaactgaggcacctggttcatctcactgggactggttggacagtggacgcagcccacagaaggcaagctgaagctgggtggggcattgcgtcacccgagaagcacaaggggtcaggggatttccctttcctagctaagggaagccatgacagatggtacctggaaaaatgggacactcccacccaaatactgcacttttccaatagtcttagcaaatggcacaccagattatatcctgcagctggctcagcgggtcccatgcccatagagccttactcactgctagcgcagcagtctaacattgacctgtgaggcagcagcctggagggggaggggcgtctgccattgctgacgcttgagtaggtaaacagagcagctggggaagctcgaactgggcagagccaaccatagctcagcaaggcctgttgcctctgtagactccacctctgggggcagcgcatagctgaacaaaaggcagcagaaacttctgcagacttaaacatccctgtctgacagctctgaagagagcagtggttctcccagcatggtgtttgagctcggagaatggacagactgcctcctcaagtgggtccctgacccttgtatagcctaactgggaaacacctcccagtaggggccgactgacacctcatacaggcaggtgcacctctgggacaaagcttccagaggaatgatcaggcagcagtatttgctgttctgcaatatttgctgttctgcagtgtccactagtgatacccaggcaaacagggtctggagtggacgtccagcaaactccaacagacctgcacctgagggacctgactgttagaaggaaaactaacacacagaaaggaatagcatcaacatcaacaaaaaggacatccacaccaaagccccatctgtaggtcaccaacgtcaaagaccaaagttagataaaaccacaaagatagggagaaaccagagcagaaaagctgaaaattctaaaaacaagagcgcctcttctcctccaaaggattgcagctcctcgccagcaatggaacaaagctggatggagaatgactttgatgagctgacagaagtaggcttcagaaggtcggtaataacaaacttctcctagctaaaggaggatgtttgaacccatcataaggaagctaaaacccttgaaaaaagattagacaaatggctaactagaataaagagtgtggagaagaccttaaatgacctgatggagctgaaaaccatggcatgagaactcgtgacgcatgcacaagctttaatagtcaatttgatcaagtgtaacaaaggatatcagtgattgaagatcaaatcaatgaaataaagtgagaagagaagtttagagaaaaaagaataaaaagaaacaaacaaagcctccaagaaatataggactatgtgaaaagaccaaatctatgtttgattggtgtacctgaaagcaaaagggagaaccaagttggaaaacactcttcaggatattatccaggagaacttccccaacctagcaaggcaggccaacattcaaattcaggaaatacagagaacaccataaagatactccttgagaagagcaaccctaagacacaaaattgtcagattcaccaaggttgaaacgaaggaaaaaatgttaagggcagccatagagaaaggtcgggttacccacgaaagaaagcccatcagactaacagcagatctcttggcagaaactctacaagccagaagagagtggaggccaatattcaacattcttaaagaaaagaattttcaaaaaaaaagagaattttcaaccgagaatttcacatccagccaaactaagcttcacaagagaaggagaaataaaacccttcacagacaagcaaatgctgagagattttgtcaccaccaggcctgccttacaggagctcctgaaggaagcactaaacgtggaaaggaacacccagtaccagccactgcaaaaacatgccaaattctaaagaccatcgaggctaggaagaaactgcatcaattaacgggcaaaataaccagctaacatcataatgacaggatcaaattcacacataacaatattaaccttgaatgtaaatgagctaaatgccccaattaaaagacacagactggcaaattggataaagagtcaaaacccatcagtgtgctgtattcaggagacccatctcacgtgcagagacacacatatgctcaaaataaagggatggaggaagatctatcaagcaaatggaaaacaaaaaaaggcaggggttgcaatcctagtctctgataaaacagactttaaaccaacaaagatcaaaagagacaaagaaggccattacataacggtaaagagatcaattcaagaagagctagctaacctaaacatgtatggccctaatacaggagcacacagtagactcccacttagactcccacacaataataacgggagactttaacaccgcactgtcaatattagacagatcaacgagacagaaggttaacaaggatatccaggacttgagcttagctctgcaccaagcagacctaatagacatctacagaactcgccaccccaagtcaacagaatatacattcttctcagcaccacatcgcacttattccaaaattgaccacttagttggaagtaaagcactcctcagcaaatgtgaaagaacagaaatcacaacaaactgtctctcagaccacagtgcaatcaaattagcactcaggattaagaaactcactcaaaaccacacaactacacagaaactgaacaacctgctcctgaatgactactgggtaaataacaaaatgaaggcagaaataaagatgttctttgaaaccagtgagaacaaagacacaacgtaccagaatccctcggacacatttaaagcagtgtgtagagggaaatttatagcactaaatgcccacaagagaaagcaggaaagatctaaaattgacaaagatctaaaatcgacaccctaacatcacaattaaaagaactagagaagcaagagcaaacacattcaaaagctagcagaaggcaagaaataactaagatcagagcagaactgaaggagatagagacgcaaaaaacccttcaaaaaatcaatgaatccaggagctggttttttgaaaagatcaacaaaattgatagactgctagcaagactaataaagaagaaaagagagaagaatcaaatagatgcaataaaaaatgataaaggggatatcaccactgatcccacagaaatacaaactaccatcagagaataccataaacacctctacacaaataaactagaaaatctagaagaaatggataaattcctggacacatacaccctcccaagactaaaccaggaagaagctgaatctctgaatagaccaataacaggctctcaaattgaggcaataatgaatagcctaccaaccaaaaaaagtccagggccagacagattcacagctgaattctaccagaggtacaaagaggagctggtaccattccttctgaaactattccaatcgaaaaacagggaatcctctctaactcattttataaggccagcattatcctgataccaaagcccggcagagacacgacaaaaaaagaattttagaccaatatccctgatgaacatcgatgtgaaaatcctcaataaaatactggcaaactgaatccagcagcatatcaaaaagcttatccaccatgatcaagtgggcttcatccctgggatgcaaggctggttcaacatatgcaaatcaataaatgtaatccatcacataaacaaaaccaacgacaaaaaccacatgattatctcaatagatgcagaaaaggcctttgacaaaattcaacagcccttcatgctaaaaattctcaataaactaggtattgatgggatgtatctcaaaataattagagctatctatgacaaacccacagccaatatcatactgaatgggcaaaaactggaagcattccctttgaaaactggcacaagacagggatgccctctctcaccactcctattcaacatagtattggaagttctggccagggcactcaggcaagagaaagaaataaagggtattcaatgaggaaaagaggaaatcaaattatccctgtttgcagatgacatgattgtatacttagaaaaccccatcgtctcagcccaaaatctccttaagctgataaggaacttcagcaaagtctcaggatacaaaatcaatgtgcaaaaatcacaagcattcctatacaccaataacaaacagagagccaaatcgtgagtgaactcccattcacaattgctacaaagagaataaaatacctaggaatccaacttataaggaatgtgaaggacctcttcaaggagaactacaaaccactactcaatgaaataaaagaggacacaaacaaatggaagaacattctatgctcatggataggaagaatcaatatcatgaaaatagccatactgcccaaggtaatttatagattcaatgccatccccatcaagctaccaatgactttcttcacagaattggaaaaaactactttaaagttcatatggaaccaaaaaagagcccgcattgccaagacaatcctaagcaaaaagaacaaagctggaggcatcacgcgacctgacttcaaactatgctgcaaggctacagtaaccaaaacagcattgcactggtaccaaaacagagagctagaccaatggaacataacagaggcctcagaaataacaccacacatctacaaccatctgatctttgacaaacctgacaaaaacaggaaatggggaaaggattccctatttaataaatggtgctgggaaaactggctagccatatggagaaagctgaaactggatcccttccttacaccttatacaaaaattaattcaagatggattaaagacttaaatgttagacctaaaaccataaaaaccctagaagaaaacctaggcaataccattcaggacataggcatgggcaaggacttcatgactaaaacaccaaaagtgatggcaacaaaagctaaaatagacaaatgggatctaactaaactaaagagcttctgcacagcaaaagaaactaccataagagtgaataggcaacctacagaatgggagaaaatttttacaatctacccatctgacaaagggctaatattcagaatctacaaagaacttaaacaaatttacaagaaaaaaaacaaccccatcaaaaaatgggcaaaggatatgaacagacgcttctcaaaagaagatatttatgcagccaaaagacacatgaaaaaatgctcatcatcactggccatcagagaaatgcagatcaaaaccacaatgagataccatctcacaccagttagaatgacaatcattaaaaagtcaggaaataacagatgctggagaggatgtggagaaatagggacacttttacactgttggtgggagcataaactagttcaaccattgtggaagacagtgtggtgattcctcaaggatctagaactagaaataccatttgacccagccatcccattactgggtatatacccaaaggattataaatcatgctactataaagacacatgcacacgtatgtttgttgcggcactattcacaatagcaaagacttggaaccaacccaaatgtctaccagtgatagactggattaagaaaatgtggcacatgtataccatggaatactatgcaaccataaaaaaggatgagttcatgtcctttgcagggacatggattcagctggaaaccatcattctgagcaaactatcacaaggacagaaaaccaaacaccacacgttctcactcataggtgggaactgaacaatgagaacacttggacacagggcggggaacatcacaccccagggcctgtgtggggtggggggcagggggagagatagcattaggataaatacctaacgtaaatgacgagttaatgggtgcagcaaaccaacatggcacatgtatacctatataacaaacctgcgcattgtgcacatgtaccctagaacttaaagtataatttaaaaataataataataataaaaatacaaaaatttgctgggtatggtggcttgcacctgtagtcccagcaactcgggaggttgaggcaagagaatcgcttgaacctgggaggccgaggttgcagtaagctgagatcacaccactgcactccagcctgggccatagagcaagactaaaaaaaaaaaaaaaaaaagaagaagaataaaaaaagccggagtgactgaatgaggccgcaggaagcagaaagcaggttgcaggctgagaatcctgttttctccactctcagctcaaaccagaccccctgtcccacagctagctccccagggaaccccgtgtccatgaagtgagagaaccgtattagggtcgggcttgcctcttgccctcatggaatctggaaggacatcctgcactgagaagggtgtggactgggactgggagtcctttggggagtggagactgcaccacctttatctctctcatgcccagagctgggtcctgcacagcccagctgctcagtgactgagggtgcactgtatcagggggtttccattcaggaggccggggctgagggctggccacctctgccccagtgtcacctgatgtagcaggcctgctagggaaatccacaccagcctgccctagaattctctaggggaaacttcccccatgactgtcccaacaatagagagcatcctcccgctgtcctatcccattcagcctagtttctaaacactcacagcctggaattgtcattacacacatgcccccacatatgcacttgcacagcaaaaatcactgcacagttgtgtattcataaagaaaagccagcagctagaagatttgttgttttcactgcatctgactttgtatgtttttctatcatacagcaactcactctcaccttgttgcattcatgcatgtgtggagaccgcagcctcatcgcatacccactcacattccacaatccctctctcttcactgcagatgatgcacttcctccaccagcactgccttcccaatcattaacaaagataggtgtggagaatacagatgcttgcaggggagggatacgttcctgctttatggaaatctctgcagtgggttcagtttacttgactgaatagaataactgcatgcatagtgtacagtggttagagcatggcctctgggccacactgtctgtgctcccatcctggtaactggctccatgaacattggcaggtgctctgtgcctcagtctccccatcagtaaaatggggatggtgatcatactatctgcttcttagggttgtagtaacagtgccacgcttgggcagtgctggcacatactgcatgctgggtcaatatctcctattgtcatcatctttattcttggcccttttaggagtctgacctcccctgagctggggatgtctctgaggccttcccagagacaacttcagtttcccttcccacaagcaagctgtttccatttgattttccacatggcttaaagtgctcattatccctctgtgatctgttctgccagcagtatggtgcaccctggtatggggccccctaattgccaataaaaggggctgtcgcgaaggattcagcagtgtttaagtgctaagaacaacccactgaaaaggatgattgtttttgataaggcttctcagaaccttggcatttcagcaaccgggggggcagggcctggatgctgtcagggctggagaggatgctgtgctcagagggaagctgtggttaccagggccaaccatggaattgccaactgcagaatgttctttaagaggccactgaggttttgatgggtagctgacagtgcccagccactgagtctgtgcgaagaaatatttaatgaatgactctgggtcccaaggctaggacgaggggtgaatgggcaggaagatacaacaaggaagtggagccacggttcccaccatcgaaaggggagagagttaacagaaagtgtgttagctgagtatttcccaaagggggttccatggaaccctagtcctgcaaaattctctgtggaatgaaaaggaagagtgaggtagatttctagccaaaaaccttgggaaagaaatattgcatactccacttccacatatgtgaagagttaacatccactgaagaagttctgcaataaaaatttcaacatcgtaacaattttctacattttaataatgtattagcagtcttatcattcagtatataccaaacatttgactatataatctttttgatttttttccctgttaaaacttgaacattttgaggaatgaggaccatttagaggaatgaggctttctgaaagcatcgtctgtgaaccatcccagctacactaaatttaaaccaccaaccctcccttctctcagtgattctgatgcacactgacatttagagccaggggattggtgcttccagagcaccccggggagctctgcagtacaacaatgacgagaggaatcagctctgcacgggagtgtgcagggtacgtgctgtgaacggcatgtgctatgaggttcacagggtgtgggctgctgaggaggctgcagagctgcagagaggaagagtcctcaactagatcctagcaggaaggaagactcatgggagtgggagggtgtggagagaacattcttttgttttcactgagtccaggaagagtatagtagcctaaagtgaaatataactccatacatgctgctgcttcgtgtgcccttgagaggcaagtccaacgcttgcctgggatgagccgagcttgggtccccttcttctctgtcctcagcttgacagccacctctctgtatgggtcctcagtgtgagccagaggtgagggtggtgggagagagaggtgggtctgtttcctggtgagaagttccagaactcaggtacagtctgcctgtgaggggtctgcctgcaggcacctgccttcctgcttctctgacttctctggcttctttggacattcgagggtttgtagaacagctgacacatgtatgtgtatgtgtgtgtggtacatgtatgtttgtgcgtgatgtgtgtgtatgtgtgaggtgtatatgtgtgtgcatggtgtgtatgtgggtgtggatatgtgtgtgtgtgtatatgcctgtgtgcatggtgtgtatatgtgtcttgtatgtatatgtgtgtggtctacatgcatgttgtgtgtggcatgtgcctgtatgtgtggtgtatataatatgcatgtagcatgtgatgtgcacatatagttgtagtatacatgtataccacatgtatatatgtggtgtgtgcacgtatgtgtgtttggtgtgtggtgtgtatatgggtgtggtgtggatgtgtgtggatggatgtgtatattgtataagtgtggtatatatatgcatgtatgtgtgtagtatatacatgtatgtgtgtggtgtgtacgtgtgtatatgtacgtgtggcacacattgtgtggatgtgtgtatgcataccatgcatgtgtgtgtatgtatgtgtgtctggtatgtatatgcatgtatggtgtgtattatgtggatgtgtgtggatgtgtctgtctagtatatgcatgtgtgtagtattgtgtatatatgtgtctgtggcatatgtacatgtatgcatatgcggccctgtggcatgtgtacatgtatgcatatgtggcacttgtatggctgtaagcatttgtctggctccagagccacgtggcagggctgggtgacagagtggccacttgggtgctcagcccagggcaagtgggccctggggaaggacatgtgaaaacgttgggctcctggttgtccagtttagcttggcagttaataactctgttgcgtgaggcctggccccctgggcactgcctgggccaccacctcagcatcaagggacagcaaaggaaagctctgcaggtgagactcttcctgctctgggctaaggctggaaggagatggatgtcttctccacgtgctaggctatttctccagcccctgttgatgaaagtttgcctttagtggttatatgcctgtcttgtgccattgaaacaaaccccaaggaggtgtccagattcttgatatgcactgcagttcttatatcaagtagagtggcaataaggagtgcggcccctgtgtccaaggtgttgccctatacctacttctccagagactcagcttctcgtctgccaggccccgagtcttcatggcgatctccttcctgatattcagacagagaggcccgatgccttgcccactgctctcctccatgtgtccagctcagcggctggggtcctcattcttctcagtgctgtcacctccacctgctgcctcctccagggctgctgagcttcacagctccgggggtgctgtccatatgatattcgttcctggagctgcacccccagggctccctggagctgtgcaaagatggggtccggctccttggtttgtaaagggctcaccttgctggcacttttgttcctcagctctgagaatcagagttgcagtcatcacgggggagggaatgaggcaggaggccggtcagtgtgagagttaacaagactcaagccttgtggcaaaggagaggtgagacccggcccaaaggcccaaggtgggcttggggcagagacctgtggggcagagcgagagaggaaggagaagcagcctggtgccgagttttccagcctggggagggagacacaggagtcaggaggctgagccacagggcgggggtggctaaagaaatacggtgtgtactgggaatggcagggatatcgctgggtttcttgtcatttaaatatggatgtaggctcttgatgtcgttcagggatatgttccctgagttgttgtaaggagttgtggggattcaatgaggaaaatgtgtgagtctgtcacctgtgacgtgtgtcgattgtgtgactgccatggctcttggaggagcactggttgccaccgtgactccaccacctgctccccagctgggccatggcctctctccccaggctcctctgggaatggcagggatatcgctaggtttcttggcatttaaatatggatgtaggctcttgatatcgttcagggatatgttccctgagttgttgtaaggagctgtggggattcaatgaggaaaatgtgagagtctgtcacctgtgacgtgtgttggttgcgtgactgccatggctcttggaggagcactggttgccaccgtgactccaccacctgctccccagctgggccatggcccctctccccaggcttctgtttttcacccccaacatggagatggcagcagctgatcacagggctgttctgcagatgcacggaagggtgggcttcctctgtaaagaataaacacatacatgcaggcacagcttctgccctggctctttccctcccatcagctgggagcacatttccctgaccccaagaatctggaagtccagagattggtgggtcccccgccagggatactgctttggaaatgcccaagtttgccctgcccagtcacctcccttagcccaagggtagtgccccctcctccaggcagagaggttccaccagctctctgcacaggggcattggccccctcacagctgctgccagtgactgttactgtgacctgtcctcgctccctgccagttgaggagtagtagccaagatgccaacctgcaggccaggagggagatttatgtgcccatctgcactgcccttcaactgccttcaaggtgaatcaccatcttcctggaagatgctttgcacttctaggtttggccatgaccttctctacatagttgctctctctttctatctctccatccatgtttcttactctctaagggccttacgggcctcggatcctaggacggtaaatcattcttgacatcctaatcttgattcagtctttcagccacagaggcagtagggtcgtgcttcctcctgttacaaagtggcatctcctcaatcagttggcaggaatccaagctggccctcctgtgtgcctggcttggccactgtgggggcacaaagagaaagaggcagtccagtggaaaagattacagtctacttggggaaggtctaacattcatgtaagagagcagtgaccaagaggtgatccactgaagctgaatttataggcgccagagaacattgggtatttaacagatcagggattagggaagacacgtgtggaggagaggcttcaggtcactgggctgaaggaggaaaatgaactgcatgctgagtgaggtctgcaatagatgctttggaagcaagagttttgtttgcatgtatgatttttttttatctttgctttctatgttatttttggctgctatccccaatgataattacattcgaggcccaggagggggttgtgaacaagccggtcaacatctcgggaggcaggggctgtccccttgggggttgtgtgatagaaggtgagtctctctagctgacctggagtttcagagttgcacttggagcaagcagggccccaggagttggaatggggaggatgtgaggcaactcgaagaaaagggagagaggacgatcctagaacattaggggccacctgcttggaggactggcaaccatgctgtaattgattagtgatatctgccgctggcaggagaggggatggtagcagcacgcatgccagtcagaaggagcccatctacagggcatggtatttcattctgggatctctttatttaaatatgaagaatctgaagtccagactggtgaagtgactttgccgaggtcacacagtttattgacgcaaaaagaaaacgcatgtttaaagaagatggtgaaaatctcttgcagtatatgtcaggagcactgagcttccagctctgggggacccagggggtccctgccatcaagggcccgctatctcctgtgggagagaggtcactacaggaaatagaagtgagaactgcaagaggccggctctgctactgtaagtcacccacacagatagcaagttcagggcagagcgaggtgactgcagtttgggaggccagaggtgcttcctggctgagccaatctttgacagatggggcacattcggagagggcaagaggggagcaaggcccagttgacaggccatggtcaggagcaaaggggattacggggatgggacaggaaaggcatggggagaagcacccagggccatggcggccctgaataaatgtggctgatctgctagaaaggattgtgcaagctctcagggcagcctggaatgaggaagtttcaagttacttagacctgcaggctgcaggctgttggtgcccagagagagggaccagtcttcatgttatcaatgagacccaggaaggctgagggacttgcccagagtcagacagcccaggtggttctccccagacagtcctcttgtcccttcgactccataagccctccacctctcctccaggctctcattacctcctgcctcctgtctgtggcggctggagtgcctggccccttctgcttggaggctggactgtccagcctttccggtttttgtgccctctccttctagttaatcaaagctgctcgctctctctgtctctctctggaagagagattggtttcctcttccagttactatctgagttctttcactatacattcgttagtttgcctgttcctgaacataattggttctcttttgcatctgggttcttttgttccctgtatgcttgtgatatttattcatattgctgcatgttattttactttgtttgtgctcactgcggtgtgatactccaatatgtgaacataccacggtttatttatcgaatcagctgatgacaggcatgtgggtggtctccagtttggagctgtaatggcggatgctgctgtatacgctttctgtacatgtcttttggtgagcatcgggcacatttctgtgtgtttatacctgggagtgaatttctgggtcatacggcgtgcacacgttcagctcaggtggatgtggaagtattgttttaaagagtgtgacgatggaaaccagattgcaggggtaagaagggctggagggcatcaggtgcggtcaggggttggagaatttgccagggagctcaccagccagagagcagagaaaccaaatcatagaagctgcattgagtaaagaggtttctgtctctggggtgggtcacatagggaacactggaggatcggctcgactcagagaaatccagttgctggtgtagccttggtcggtgggggcttctggggagtaggactgaactgtgaaggaaggcagcctccatgggctccccagtgggcctggctctgcagagcccctccctggggagaagcctcagccatcaggctggcagtggtgatggtggctctgggtggtacagagcccttgctgggtgtggaggctttgaggagagagccatgggcctggggcagcaggggcctggacccttctgtatacatctataaaacctcagtgaaacgagggcctatgcctggggggaggccaggagacccccaggcagtcccctgactctgactgggtgcaccagccaccatactcacttgggggctcactccagccccccagcccctcaggccctggccccgtgttctcagcatcctggccgagcaattaatgtcagccctttcacccccatctcttccagaatggcagcaaagacaactctctggacatgctgggcacggacatctgggcggccaacaccttcgattccttcaggtaacctcctcctccctccttccctgtggtgtgaggtccagccggggaaactggcttccttggggacggaatgaacgctgatggttcatgagcaagaggcagagagaagcagagtaggggatgtaggaaggatggggtggaaagaaggccggagagaggaggcggtgagtgtcaacgggagacagtggaggcatggggagggcccccgggatggggctgcagaggctgggccccgcttcccactagcctgcctcatctacctcagggtggccgggtcgtcactttgagctgcttgtcagaggctggagactggcatttggccccttgctctccctggccttcctcaaatgtgggcacgaaaacaaactcaggtgttgcagaggccgctgtgcaatgggcatcaggcccacacttgtttcataagcatgcactttcccacggcagggtgaggaaggtgaggggtggcacctggggctccattctgagtggggctccccgcctggcccctggcggctcctttctgcggatctgctctgccaggttcagcctggccccctggttccgtcagtaactgggctgttgccctcttgcctccgtttctcaccctccctcgccctctagtggtgccacctgggacctgcagccggaaaagctggacttcacccagttccaccgcaaagtccgacacacgcccaagcagcccctgccacacatcgaccgcgaagggtaaggggtgctggggctcttacccagggtggggtggggcaggggacgggagtggcctttgcctccacagggaggctgctctgctgcacaggggactcaggtggctgatgccccgggatgctcttcttatgcgtcccagagctgcaggctcactggcttctcctgcccagccccctctagccatgccatccccacctgctcctgatgacccacagtggccctgcttgtcagtaatccaggccagcgcagcagaatcacctgggcggtggcacagaggacaggcccaccccagagtctgtgattccgtaggtgtggactgaggctgtgtgtttcttttttttttttttttttgagacggagtctcgctctgtcgcccaggccggactgcggactgcagtggcgcaatctcggctcactgcaagctccgcttcccgggttcacgccattctcctgcctcagcctcccgagtagctgggactacaggcgcccgccaccgcgcccggctaattttttgtatttttagtagagacggggtttcaccttgttagccaggatggtctcgatctcctgacctcatgatccacccgcctcggcctcccaaagtgctgggattacaggcatgagccaccgcgcccggcctgaggctgtgtgtttctaacaagttccccagcgggtgctgatgctggtccagggaccacacttggggagcagctggtgtcatgcctgattttacactggcttttctcaccctctatgactttgtgtggcagggttgccttcccttttcaaaagtggtgtcacagcctgggcagacctcaggacgggaatgtgactccagcgagacacagaggtgtgggacaaatggctgctccttcttttatagttttatataatttttaatgaggcagaattcccataccataaaattaaccattataaagtgttcagtccactggcatttagtatgctagacctgttgtgcaactaccatgtctatctagttctgaaacattctcatcatcccaatataaaaccccatacccactaggcaatcattccccatcccatcaccacccccagtccctggcaaccaccaatctgctttctgtttctattaattaatctattttgcatacttacagaaacagtcatatgtgacctcttgggcctggcttctttcccttggcataatgtttttgaggttcattcattatagcatgtagcagaactttattccttttcatggctgaatactagtccattgtatggatataccacaatttgtttacccatgcatctatcaatccttacttgagtcatctccaccttttggctattgtcaaaaatactgctgtatctttttgagtccttgcttgtaattacttgggtgtatacctggggtggaattgctgggttgtatggtaattctgttgaactctttgaggagctgtcaaactgtgttccatagcagctgaatattctgcattcacaccagcaatgtatgagattccaatttctccacatccccaccagcacttgtgcttttttttctttcttggtttttgtttgtttgtgttttattatgatactgatgacccttacttttccttccagccctcccctgctcactcttgtctccctttcacttcaggtctaagtattagtgactttactggacactatcctacatctcacatgtcttcctgctgctatatttgtcccactcaacctctcctcttggcaacattggtcccatcatagtgtaatgagcaacaacccgtggaaagaaatgggctcattcctactttagagatgaggaaaataacactcagagaagcaaagtaacttgcctgaataacagagccatcatttaaggccaggccttctgacaccatccaacccctagttcaccacatcagggtattcttaacctccttaaaattttctgcaaatttgtatgtgtgcatgcacacgtgtgtgttgctggggagaggcccatcacttgcatccgactctcccaggagacaccagcctctcacacgcctctttttcattgccctccctgttgtgggttccatttctctttgggtgaagagggagagatggctttgcgcatggaggcactggttaagatggagcataggagagacacagctgcaaggctcccgaccctaccttaccccatccaccctgctcactgcctgctcagcccactcattcagttgcagggaggccatgctccttccagactgctgagctgcacagggctgggcctccacacttctgtgcttaggaaggatggccttacctacctttctcagtgggtcagcttcaggaaggggttgtgagcaaaggtgatgcttgcccagtgtcctgttgcaacagtgtagcggagcttgggtatgccacaggaataggagcaggattttgcttttctcaagttcagtgtagccagtctgtcactagacctgctgggtccctgcatggtgctgggtaccaggaaagtagacacacacacacacacacacacacacacacacacgagtatacaatacagtccctgcccagaaggactgtttattctactgggaaaaggaaatatgaacctattcatgatggagactgtgtaggggaagaaagactagactatgcggtgtagacatacagactagactatgcagtgtagacatatagacaccataaagacatatatagacaggtataaagtgtgatgcctggtgcagggttaaataaagtcaatgcaaaaggggttagaaaggagagcactttacaggttgaaccatctgggaaaggcttcaggagggagacttccctgggcagctccagtctctcctgtgtgccccgggagcacatagctggtgacgtcagtggggacactgaggcctggggagatcgaagcgatggtgctgccttattgactacaggtgcccaatggggcctgcatgttgaaggcaagcttgccaaagtgtctcaccagtccccagagatgaactaacttcctagcaaaaaagcgatgaataactatgaaggagaggaattccccttatgccgagggactttgtcccttctgaagccagagtaaccagccacacctgtgtcaccagctgtgggcctaaattcctcggccagtctcactttctcaccaggagcctccagatttgctgagagtcacctggggtctcccatggatatctggctcactagccaaagcctgtcactcccaggttcccagggagtctgagtgcagtgtctgtggccacctcatggccagaccaggaactgtgacccccttagagtcctgctgtagtggggacacactccatgcgccagccactgcagccttcctgggatgcaggtaccactcagttgccaaggctccctgcagcctgtgtttccatggagggacagaaatcagagaaggctgttgccttggaaaccctgttggcagcagtgactcagctggtctgtagccaccttcagccctccaaacctgcaggcctctggggagatctgagccctgacgagggcaggcctcgtgggacagcagccctccctgcaggcctccacctgcccacccccaggggcgctgaggcgagaacagaaagctgtgtttggagtgtgctaggctggtgcccagcgtgtgcttggagctcagtgcatgcgagagagtcctgaggtgtgttttacccacaggagacactggggaggtggtatcagccattctagtcaagccaagtccccagtgccctcctcccctatggcccaggcgggtgcagaacacagaagactacacgcagttggtgctttcacaggccagcctgtctgcaccaggcagattgatgagttaagagatgtttggatgttccgggcctttctccacctgctcacctgtagccccagcacatcacagttgtggggacagccgggggccgggggaaactttttcttttccttcatgcctgttataccttgcacaccattccccaccccagctccaccatgccccttgcctaccccttgcaccctgacccctaacatgctctagccacagcaaactggcaccacacatgctcctaactctaggcctttgcctgcgccgtgtcagcctgggacatcctcccaaattccctgtgcttggccagctcacctctcaccttcctcctgcccctcgcccaagacagttctagacgctgctccttggggttcctgcaacgatcccttgtccccagcggggcacttgctgctctactgtggggggtgattatcccgccagacaccgagaggggcagttgtgtgcactgtttacacctgggtcccagaccctgtccagagccgggcacagaagtgtttggtgaatggagaaatgagccatcaaatggggcttgggttagccccctgttctcttccacccaggcctttgctggtgtttgcagctagtttctcctcctctgggttccagggcgcctctggccataggacttttatgacaccgatctcgtgctgcccccagtggtgctccggcacccagccctgttagaggagtttaggatttgttctaagggccatccactgtctgagggcaggaaccaaaactgattttttttttggttcacaaggcccaaaacagaagagatgcttggtaaatgtttaaacaatgaactagttactctgaaaggtgagattcgtatgaactctgcagctggaaaatgacccaactcatgggacatctctcaccattcctcagtcaataccagtaataatagtaactgacaatacttactatgcaccggccatgctccagcctctgttctaagtgtttgcctcatttatttaaaactcgccaccacccagagagggaggaactgttaccatcttctcttcaatagatgaagcaactaggagacccagaaattgagtaatttgcatgaggctgggttggctccagaatctgtgtccttaattaatcaccctcctgcctctttgcctaaacaacagcaacaatattagtggtaatgaaagtagtcatagtagtagcaatatatttacttcattatttattttaattttgttattattaccagtatttaccattaaacatatgtgtgtatgtttaagatatatttaatggtaaatacagataataatacatacacaagaaatatacacacacacatttataaacaaacaagctaaacatttatatatatatatatatatatatatatatatatatatatatatatataagctagactatatatgtgtgtatatatgtaccgtttactgtgggctgtcacagttctaagcatctaagcactccagatacattcattaatttaatcctccagccaccttaagatgttagacactattatcctcatttaacaaatgaggaaactcatttgatgaaatgagtacagagaggttaaacaacttgtacagggtccccagttggtaagggatgcagcggggattcaaaccctgggagtctggtttcggaatctgcacccttaaatatgccaaagattcagacctctggccagggagttggggccagcctctctggcccgagggcacgcccactcacagaggacatgaagacaaagcatagactatctgagtgggcttgctggactgacccagagtcaagccaaaaaggaaggaagccctattgggttttctgctagcccctgccagcctatgtgaccttgagaaagttgcttggtgtctctgtccactgatcttctgttcagtgtaatggggcaaggtggatgggctttgacaggagttgtgatgagtaaggagcttagcttctctgcctggaaggagcaaggggaactctggttcctctcccacctccctccaggttggctgttgcattacgggaggacccccccccacacacacacagcttctctagggctgtttcctctaggtgggacagcccctgcagggcttgagggtgggcagcaccaggtatctgctgactgtccctcctctcctgctggccggatgggacaggaggcatgaatgagccatctttccaatgcctttctgtcttttctggtccaggtgtggcaaagggaagctggaagatggggatggcatcaacctgaatgacatcgagaaggtccttccagcctggcaggtaggtgcaggggcaggctctctaacagcccacccccacccctggagtcctgatcctcttcctggacaggacctaaccaaagcactccttctggctgcttgttccagcaaggagtgtaaccgcctgtatggtagtaataggcagggctggctacctgccattctccagggtgtcccattgtgatcgtgtgtgtgacagcctactcggtgatgctgcaggccctgctggcaggcctgatgtgccctagagatgaaatagaccatgccctggcaactcagtgaacttggaagtttttgtcccttggcctgaaacctctctgcaggtgaagtgtcctgtggtgtgttcaggtgggactggcaggcctggaagagattctaatgtggctggggctgtctttaggcttttgaacagtggacttgccctgctggcctccaggtgtctgctatgcttgctcttttttttattgattgggcctctttcctggaatcaggccaggttccaggacaaagaggattcactcagtgaatccaggtctctagatacttatagtgctggacttttggtggaaacagcaggagtctagctgctctcaggagtgtgactgggcctgctgcaggggtgtaaaagcagtggaccttccacagtgactgagtctgccgctgccagtgaccatgacctaccaccacactccactgtgccacccttcccttctctcctgattcttctcctgctattttatctatatccattcatctcttcctggtgcctttgccattttgtttcttctctgttcatgccttgggcctatcaatgagagacaatagagcatacagttaagacctcatctatttgattatgatgtgccttggtgtggtggttttcttcatgtttctcccacttgggatttattgagtttcttggatctgtaggtttatagtttcatcaaatttggaaaattttcagccacgattcctcctactttccctcaaccctggggttccaattgtatgtattctatgcttcttcatcttttcccatggctcaccaaagctctgcctgattttttaaagtctttctttactctctgtgtttcattttggatagcttttattgctatttcttcaagttcactaatattttattccagtgtcaaatctactgttaatcccattcagtatatttttcatttcagacattgtagtttttatctctcgaaggtcattgtgggcttttttaataaatatatatatatatatatatatatatgtatgtatcttctcttcctcatgctttcttttctgcagcatatagaacctattcccaatagctgttttaagtccttctctactaattctgtcatccatataatctctgagtctatttctattcattgatttttctcttggttatggggcatacctttctttacatgcttggtaatttgatgttaaatgtcatatgttagaacctttacattattgggtgctattttttttgtatcactttaaatattttgggttttgttctggatcacagttaagttacataaaaacagtttgatcctttcaagacttgcttttaggctttgttagggtgggaagactttagtgtagggcaaattttgctccactgctgaatcaatacccttctgagattgccacccaatgctctgtgtattaggaggtgttcccccctggctggagaaacacaaactattttcagccgtatgtgatctcagtggattgttctatctattccttgcctcagaagtttccttacacatggacaaattaatactcagccaaagacttgagaggctaagatttctggatttatctctgtatgttggtctctcctctttagtactctgccttgcaaatcaaattgtcttggactccgtggattttgaaccctgtcatcttagctcattgagaccactgggccctggactgccctccctgtgttgcagactggaaactttccaggcaatgaaccagggcacacatagaggtcacctcattacaaagagaaatatgatgactttatcacggagaaacctggaaggccccaacgtgaccaggtgatcaaggaaacatcattagtgatgggatgggtggacactatgtccttccttccaagaaagcatagcctgagtctggtttttggaaatcagtataaggaccactctctataactgcttggacacaaaagacagggaaagactgaggaagtcttccagattgtagaagacagaagaggcaaatgactaaatacaacttgtgttccttgctgaaatcctgaaccagaaggaaatgctgaccttgctgggacagttggagaatgtgattaggtctgtgggtgggacagtagtgttgcttcgatgtcagtttcctgacttggaggcggtgttggtcatgtgggcgagtgtgcttgactttgagaaatacacactatgatgtttgagggatatgggcctggtgtctgcagcgtctcctcaaatggtttagaaagagattgatgataatggtttgtagacacagaggaagagaaagggcaaacatgcggaggtgttaacagttggggaatctgagtgaggaggacgtggatgttctttgtacagttcttgcactttcctataaatttgacaggaaaaagaatcaatcagtagggccgaggctgtgatgtataagtcacaggcagagtatcagctcatgaaacaccctttgggctggatctatattaaattatcactgctaatggaaagccagccttgacgcaagagaaaaaagggtaaggtactcgaagtgaccaccttatcactccatttctaaatgccaagagcattcatcattgatagaagaagtacatttgagagaccccgatctaggtgagaaaccagatgccccctgcactaggcggggtgttgaccactcggtaccctttgagccagaagcttgggagtcatggctggaaaagtaacagatctgacgctttgtgttgtttggtgactgtttcttcactcctctagggtacaaaatggaggacctttggttcctgctcagacgagaaaggagagctgggctgctggctgggtgggaggttggcggtcaagggcttggtgtctggacccaggcatagtccccatggaatcccagccctgccattgactagcccaggagtctggggctagctacttactcgcactctgcctcagtttcctcctctgtaagatgagggaaataaccatatctactttatggggcgtttgggaagatcaagcacattccttcacttgaggtgctgaggatgatgcccagcgcacagtgggtgctgtgttggtctctgctgtaattattcccgggactcaacaatgccagtgaagccccaccttctgagggtggaccaggctatgggggccccctctgttaagaagaggaaggagggggtgatttcctgctcctacccccaggtgagttgtttcttggtgaagagggcaattctgctgggcaaaagctcagatgatgaaccttggctcataggttaccaaggccctggttgattcttctcctatgcggcctgacaggcagtggagacagattggactagaggtcagaagaatccacttctggatgtctgccagagccgtgtgtgtgacctctcctctgtgggcctcagtttactcatcagcataatgacacagttgtattagatcagaggtttgcaaactgtgaagccctcaggattctcctgggttgcccctgggtgctactggggggaatagggaggcggaagcagccagttctaggggcccccacttgggcccacccagaactgtttggctggtgcctctaaatcaggattctaacgtggtttcatgtaaagaaacaatcctactactaaacaaactttgaacatcatcagaccaaggtcctctgaggtttcacattctagagttttcttttttttctcaagggacggtaaatcagtgagaattccgggctctccagggcccacatgtgatgctaagctcttaggggcggctggtagtggaggccttcacccaccgtctccaccgtcaggctggagcagaagggcttggatattcgtgcgcgcgcacacacactcttacacaccatctatcacacacacgtacacacatacacacaccacacacatcaaacatacacattacatatcatacacctacacatactcactgcacataccacacaccacacatgtacatacacacatatacacatcacacacatcccttcacaccctacacacacatacactacacatgcacacacatacatcacacacatatacacccatatatacacagcacacacacacacacacacacacacaccccacatgtttccatgacacacactttggatgtgctttgccctcagtgaactatcagcagatgaatctgaggccacggtgctggagctcagctgcatgtcggaactgcctgggaagtgctgaaatctacactgtctgcccactgtgttcctcatttactgttgtgtaacaaattgctcaaaacttactggcttaaaacaacaaagagttatgatccacacactttctgggagcagcttagctggtggttcagactcaaggtctctcatgagtttgcactcaagctgatgaccagggatgccgccatcagaaggcacacctgggctggaagaccccctcctgtgtctgaaggcaggaggcttcagttcctccctggctgggggcaggaagcctgggttcctccctggcttccttgccacgatatctgcataagctgcttgagtgccctcagaatatggcagctgtctttccccaaagcaagtggtgacggggggagagagaagactccatcgcagaagtcacactcgtttatagcctgatctcagaagtgacagagcttcacactgccatttgctgtatgtcatttgcacagaccaaccctggtacaatatgggaagggcctacacagaggtgcggatccccaaaggcaggaatcatggggggctcctggaggctggaggacaccctcactgaatcacacccaggaatccatttctttctttttttcttttcttttctttcttccttccttccttccttccttccttccttccttccttccttccttccttccttccttcctttttttttttggagtctctctctggcacccaggctggagtgcagtggcacaatcttggatcattgcaacctccacctcccaggtacaagcgattcttgtgcctcagcctcccaagtagctgggccacaggtgcccaccaccatgcccagctaatttttctatttttagtagagatggggtttcaccatcttggccaggctggtctcgaactcctgacctcaagtgatctgcccacctcagcctcccaaagtgttgggattacaggcatgagccactgtgtccagctagaatctgcatttttaaagcattgtaggaaattctgattatcagcaagagttgaaaacttaaagtcctggctgataatgctcctggcttgactgctccttggagtatctacaattcacatgggtacccttaggacaaggtagacaggcttcttgatccccaaacacagacttttggtgtttgaggaatttgcggtcctgtgagagcacaatgggatgacttatctgagttttcctagtgttcttcaaagcccctcataaatagggctggctggttcactcgtctggccttgggtcctgagggtcagctggcctagctattagcatatgtggtggggacaactcttaatagtatggacgtgtccaatgcaatgtgggatatttaggactcctggcctctgccactgaatggccgtcactggagaggggcaggcatagtgaccaccaaaaacatcctcctacttccagattcacctaggagatattgtgcatccagctgaagacccccaaatgggagggaaagcccacctctagcctgaggacctccagccctcctatgggagtcttgagcctgtacatagataagcgggcttcctagagactttcttagacaaaaatcagggctggcctcccctccctacctggaggcaagaaggaaagagggtgacaaagggaggttggcctcaagcccattgcctacctgccctccacttctgcaccccagaagaagaggggcataaagatcctaccagctgtgtccccagcatgttctcaacccacagaggcccagacccccatctccggccccttctgtccctgttcggactccttagcaggcaggaggctttgtgatgttctcagcacccttgcccagcctctgtcctgggctccccctgccatcctgtggccctgtcagtccctcccctgatctgttctgatcttccatctctccttgctttctcaccagcaggcggttccctctgcctaaaatctcactcagcccttctctgcctgtcctttttctggctcaggatacctcccctgatccctctcagatgcacaggatggagtccagcatccacctgccatttccccagagcccctgcccccatctctgtggcatggctcccaccacgtcgcacctgcttacataactgccagactcccttcctggactctgggctgcctgagggctgggccatttccttcagcctcataaccccagcaccaggtgctctagagtgagtgctgctgaagaacctcctttctagatgtgctgttgtgttgtctagagtgtacaagaaaggcaggatttgtgtctgtcttgacactcagtcgtccctctgtctctgagtttctcccaccacttcccagcagaaattcagcatgaacctggttatgctcttctcggtgtgatttctgagacacatttgttgttgttgttgttgttaaagaaaacaggatttttccatcatctcctgtattaggacactataggccatggcataatactaaacaaaccccacatctcagtggaatcacacacagaattttatttctaactttctgaaattctgctgagggtccagctggtctccagggtagctccttggggactccagggtccaggtggattgcgttctgtggccctgccatctcaatccatggtatccaagtggccctggcacaggcaaagagagctggagggtcgtgttctaggtcaagcttggccaacctgtggcccaggatggctttgaatatggcccaaaacaaatttttaaactttcttaaaacattatgaggtattttacaattttttgttttagctcatcagctatcattagtgtattttatgtgtggcccaagacagttgtttcggtgtggcccagggaagccaaaagattggacacccctgctgtatgtcttaaatgctttggcccagaaatatcagctccactcagagcccattggacagaactagtcacatgcccccgccccaactgcaagggctgacacttctgcaggggagcgggaagaaggggagcacatggctgttctgtaagcctcaagtgcctctgccaaatcttcctctttccttcacttgctcacttaactcatcttcatggacaagtgctctgccctagccttttagagagagagaattgatcacataagatacagttccccacgagaggcacagcctagtagaggaaatgagacatgcacagattaccacatgcattcaaagctgcaaatgcccgagcaagtgctggtgccttgcccaggtcacagtccctgaagggcaaagtctgggtcctctcccagtacaccccaccttcctcccctgtgctgctgcagctcctgcagtctggggcgtgaatgtgtggctgagtacaaagcagagggcgccatgggcccccacactgaatgcctgttgatctcctgggagccctagcttatctctcagtgggttacacacagagcgcatgccacaatgagtggttttaggaggtgatgcctccactgggggtcagatgctgacacctaggcgtctggccaagctcctctccagccaaagccaaggcccctattcctggtgactccatctggctgtgtttccacaactggcaatgaatccaggggtgagtctcactgcagtgctgacctcaggaacttcatctctggggctgctggactcaggctcttggagcccccacaaggatgtggggcaacagggtagacagtaggtgtctgtgtccagggctcaccctatacctctgtgaacccctgctgccaggaatagttctgcactctgaaaaggcatttagtgagctagttaagtaaagggtctgttggtggtgttaactgtccccaaggtcttccttcccacactggtggctggagggaaaggagcaggtacgctgggataggagctagccaatagccaggttttatggcatccacaccgaggcatgacatgccatacaatggcagcctcaggccagttgagactgacattgctctctaagaacactgatggggtggtggggggtcggcgggggtggagtgggtgggagatggggggcagcagaaggctctgagtacagggccatggattcagggttcaatcatggttctcagtgttgaagccatagggcagggcggacactgagacacacacttgggctcagactgcagttctaggggacccccaaattccatccacaaggctggtgtcctggtagcatttttggcatctctatcacaggagtggaggggttggccaggctaccactctgtcagtgttgtgggcagcccaggcccatcattaacagtcctgctctgagtgtggccccagtgttgaggactgctggagtggaggcctcgccaggatcggtggctgtatggtggtgtgctcccactagagggcaccagcgcaccactctgcaggctccagcctggtgcttgctgtgggaagtcccctggtcccagcgccagcagccaaaggcgtcttcaccggccatgcctcctggtcagcgctgcacatgcacactgtcctgaaaatgaccccactcaatgcccaggcccttcctccctgcagcaagtgggaggatggcgaggtgcaagaggcagccacactaaggtgtagggaagctcctgttgggccacatgtcccctgctaggccaaggcatgacactcctccagagggcccgcccctccctgggacccctgggaacacactgcttccaggagggcagcagcacggggctgcaggggaacacccactggggtggggctgggggagttacaaagtgttggcttccgcccttggaaggatgggggctggctaagtggggagatggagccgcataatctgtaatccatagtctaagccgagttaatttactaagttctgaattaacttgactaagttccaagttaacttgaccaagttccatgtgaaggcaagggatgaaatccgaattgcatatccttcacctcatctctggtctgagaccaccccccggcaccccctcccccaggacccctttactctgaggtgtgacttggggagcaatttctccatgtgtgtgaagtcggcgcgaccagtgtgagaaagacggtctaacgggcatgttgtccctgtgccctagatggcccctaggtgagcattagatttcctcaggttcccgggcacagggccctcggcgccctgcggaaatgccacctccttatatcacacagtggcctggtgcttttgtgtcatatacaataccccattgaaagacgttgtttgttgaattatccagtgtcctgcccagggctttctatcaggacgtattttggtcattatccttgaattctcccagacaaacattatgtctgctgtctttggtctgacagtaggaactacataacccactgacttctcgttttgcctttctcttaggaaattttgaaaccaaattctgtgtctgttggccgttaatcattagatggctcagacctagcagggccggctcccctgcccccacattgctggccttgtccagagcgtgtgactcaggagccctttgctgtgaaaggggcttagtgcccacacaacagtggacgccacccggtcaagtgggatttctggccttagggatgtgcccaaagcattccccattgagggtccccagaaggctcaggggacggaaagtggctttctggcctcctgagcctgtgtccaagtccagccttcacacgggagacggctaaaggaagggacagttccttcctcgttcttctgcttggccctggatgataacagagagatcctccccactacctctctaaagaatccgagggacaaatgagctttcaaaatgaaaatcatggctccatgaaatgacactcaggtgtccctcactcctggaggagtgaaaatggtggccgataaggaatggcctggcagccccagcaggtggcgctgctgctatttagtaatgggggtcctgggcgggaggccggggccgcggctggggctgccccacactggggttgaagcctctgtagccgggttcccagacctccagatgagaaggagtaactttattgttccctagggctgtgttagctgttgccaagtcttctggaaacttctaggacatgctaactcacaggcgtgaggattagtaaagtgccccgagacacccaggagcagagtcctgaaaaccatgccccacctcgcctccccaggccctgtgcaccggcgactgttgctccatgtcacccgtggtcccacggaggtgaggtctgaccttattcacccaggccaacattacggatcaggcatctctctgtgtcccaggcattgtcttatagccattatggactgagtttaagtgcaggggctggtacctgtcccatagacggggacatggtattctcctaatgtccccttagtgagaattcaacaaggagcgtaatgcaccaacagtaacactagcgaacattcacagagtgctttccgtgttccaggaactgagaaggtccttgctttttctaatcttaccctcacgttgtcccatggagcacgtactgttattgacctcactttacagaccgatgtctttggtcggatgtaaccttctcagtaagggcttgtgaacactccatatgcctcctcatcactcaagaatcgtcactcgattcttccctgcagcgcctgtcgcatgtttgctttatttcttttgcgtctgtattctcccagtggagtgtacgttcccctggggcacatctaggggctcattaaatatgggttgagtgacttgctcctgccccagagggactcccacccagcatcttagtccagaacttgtgcctccaccacagaggctaccatgacttgagtgctgtctgagctgcgggctgcatatactatctctgaagtctcacaaataccctgggaaatgtttattctattattatttcacagattggagaactgagctcaaataccttgcctcaaatcacacagctgggagaagggggattggaatccaggcagcctgactcctctggtacctctttctaaggagggacgatgaggaggaagaggtgctggaaaaacattttctaattccaggagacggtagtcacgtacagcaagttaggggtgaatgtcatttccttaataagcaagaacaagaaagtgggtatctctgtttttctctctactgctgaaggcaataaaaatggaaagaaaaaaagagaaaagcctctactgacagctttgaaagagaaatatttttttcttcttttttaatcagacaggtttgtagtggccttccccatccctgctggcccaagacgctgtagcagccatcaaggagggggtcttacaaacgagagcccctttccctccccagccacctccccacccccaagtgcttcctccctcaggacaaaaataggcgcccatacaataaatggggccagaagttctccaatccgtggtttcctgtctgagacctccaggtagcaggtccactgggaaggggcagcgtgctctgtgaggcgagcctatttttattttttgttatttgtgagtcttttttttttttttttaaagaactgattattctggaggtgaagacttttgttggtgacaactgggaaagttcctcgggaagaggccactgtctgcgtctagatggggtttccacgcgggcctcctcctgctcactccatgcggagcagaaggcagggagctgggactgtgggcagcgagtactttcagggctgtgtggggcaggcttcaaggggcctgggcaagtctgcccaccctataggaacacctcaatgatccaggccacggctaggattttagggattggcaaactggtccacagaccaagtccagctctccagcctgtttttgcaaataaagttttatcaaaacgcagccacacccattcacttgcttcctgtctgtgactgcatttgtgccacagccacttgctgtgtggaccctatcgccggcaaagcctaaaatattgactatctggctttttacagaaaaagtttgccaaacactgatctagaatataaacagaacaaaaaaggaaacctctgagagttaaaacaggtggcagaaatcctaaagctcactcactagtcatccaagagcccttctgctttgcacacagaacattgtgtaattcacccaaaataattttcttccagcttccatttcttctgctgtaaagttgggggtcatatacctgttcaacttacgttgcaaagctgtgctaagagtcaaaatacaataaaccagttcatataatgacagggatttttgaacttaaaaaacactctgcagatgtgatgtggcctcatgaagtggtagtcacatctggaagcaggcagagaactggcaagcttggcagataagaactgcgcttggagatggtccaacagcttccttctgtgggtttcttggcgggtgggagatggagggcagggactgttggctttccccagctcctcctgagactgagacctaaagggtgactgtcttcctgcccttgaccttagacagaaaagactgttgggggagtcttctgctcacccatttctctttcctcttatgtccttccctctttcttgctcaaatcttccccctctttcatggccctgttccaatttcacctcctgcatgaaactattctggataaatcagaccacatcagcccacagaggtttcttggttttttgggggtcttgattctaggccaattttgaggttttccccttttttatgcccctccatgcatttgtgcctcctggaggaggtagacctggaactgggccttggggggtggcctgggaggggagagggacctatggggagaaagagaattatggtcaggagaaaaggaggctgttgagagtgggggagtccaggagtcctcgagaggggagactgtatgtagggagagcagttgggggtggccctggacgtcttgggacctgaccaaatagggactcagccgaatgctctccagcaaggaaatgcaggatggaaggaggattcagaagccgtgggacagggcctgactgagcctatgccctcctcctggagaccaagagggagttcccaggatctccctccaggcaccagggaagaagttttgttatttgttagggacaaaggctagagccctttaaaagtaggacttggccccagtggagaggtcatctgtccatgccctactttgggccagaccatatccagaatcccttgatgagtatcagagggcttaatccttcagggagtagggccttgaggccagcatgggacagggagctgggacagtaggctcaaagaaggccagattgaggacagccttcctcaaggtctcagctgggccaaggccatcacacagacaaagagctgctggcctagccctgctggaggaatgagctcagggttgagaagaggccagcaggggtgcccggtacacagtgagcaggccccaggctggcctgagtggccctgtcgacggatgcccagaggcagacccaccctgcacacgtccacccgctttgatgaatggggccacacagcccgcagccttgccgtccctgtccttcagcagtttccagggtctggtttaatcctcccactccctgagccaatttggcgatgcccttgatgacttgggccaggcctggttgattgagattgcttgccggtccagcatcttccctcctctgtcctttgtggaaggagccgccggggcttgggggaagaggaaggtgtcgccaagggtgtgaagcatccattattcctttattagccaatgtcccatttctggtctcattctccttcctggcagcggtgagtttaggggcggagaagcccagttattttagtttccccctgcttctgtcactgggagcagtggtggtggagggggcggggacggacagggctacgtgctctccagcaggcatttgtgaatgggcctcggctcccaggctgacccgccggcaggcggcccccccaggacacactgactcttactggctggaaggcgtttttccagcattgcagcggccaggcaggaggaagctttcctctggcccaagaacaataccagggtcagcccagggacctccctcctacaccctcttccttccattgtgagctgctgcacaatcccaggcccctctgttctatacagccaggggggctggggggtcaggcccaggagagattcacagtgtgtgtgacaccgtcagttgcttgcctccacttcccaggctgggccagggatctggaggcagccgatggccaaacaaaccaagtgagtgagtggccattgggtccctgtcctttgcaaggggctacctccagagtggggcccccagctggatgctaccactctttccctcctttccccattgactcgtagcctgccagggctggaaaagacccagaacttccacctacaaccccattacagacgaggaaactgagagacccagaaaggcaaacttctcattgccttgcttaaaaatccttcactgattctcagggcctatggaaaaccctggactttcctttagcccagggcctgctggcacccccggcttctttcctgtgactccgagtctgtctgtgctctcagcttggtgactgattgccaagcccctgatccagcagcaccagttgccttcagtgtccttcccacctcatccacctgcctgcctgccccacacctggtttttgtttgtttgtttgtttgtttgttttttgagatggtgtttcactcttgtcacccaggctggagtacaatggctcgatcttggctcactgtaacctccgcctcccaggttcaagcaattctcctacctcagcctcccaagtagctaggattacaggcgcgtgccaccacacccggctaatttttatgtctttagtagagatgaggtttcaccatgttggccaggctggtcttgaactcctgagctcaggtgatccacctgcctcggcctcccaaagtgctgggattacaggtgtgagccaccgtgcccagccccacacctgttcttcaaagactctgcttagaggtcacctcctctgtgaagccctccctgataagggacttttccaatgcgttagtttattgattcacctggctcctccagcacttaatatattcctagagcacagctgcccctccacatcactggtacacatgcatgcctcacccacacatgcatctctccctgaaacacacatgatcccgggagccaaaagcgtatcttattcacctctgcagctctttgcacaggtcctcaaagtgtggcccctgatcagcagcagtaatatcacctggggacttgctagaactgcaaagtcttgtgttctatcttcaccccagtgaaccagaaactctgggagaggggcccagtggtctgcattttaacaagccctctgtgatactgatgcgtgcaacagttggagaaccactgccttacgacctacttgcaggccactggcttttcactacttctggatagttcagggagtcactgacatcaccttcccctatccccttctatctgctgctgagatttttggttggttggtttttaccattattttgctcaaatgaaggacaaagaattgtgccctgtttgacaacccaggacatggatttgcaaatggtttggtgattcaaggacaacatggtcccccagactccagcaactgctcctgtcactggtcatgcctcagaggacccctgggtcccgacagccctgggcgggccattggggattagggtttctggaaggctcattccctttgcaccaaagatagaaacctcagcagagtcctcagtgacgctgcgtatttccaggtggtcaaagccaacacctggggtggagatgtgggggcaacccacctggatggggcgaagccctgggctcagtgttccagatctttccttccagcgcactgctttgtgtgtgtggcagatgaaccatccacagcgtgctgggcagaggccgacagggagaggagtttgttccctgcgtgcagaacctctgcagcggcgggcgctgacaccgaagcacactgggtggcagggggaagcctccctgggaataaagcaacaaacacaaacttctgtctgcaaagagaataatccaaagttgatgttacatcgaccataagtaagaacaacaagggagtagcaggcctagctaaacacgccctggaaaggctacatactgtggttgtgtccagaaaacaattttggactccaggaaccccacagaaaatgacggcctgtcccttggacccctgcttgcagtgagaccactgtccctccgagcatcagtggtctcacttcgagcagggggcacaagggacaggccatcatttcctgcccccgagcctcaccctcctcctgtgaaataggagtgctggccttgccctccttctggatccaagccttcaccccccttgcccacttttggggtgctcctgaaggaaagagctctgattattaaagcattagatgtagtcttgtgttctccaaagaccctctttgttccttttggcaccccacccccaaagggttcaggaggaagctctgcctctagcggtctaggccctgctctctctccagagtgaaaacctcaaggagtgttttcattactcctggggactttggtgttgcttttcgctgtgggtttcctggagtgtgtctcttttggatcccagaggtctgccagcctggccgggatccagggagggtaaatggtggctccttgtctgctgagacaagcgtggcaccactgtggccaccagccctgaaaatttggggcccaggctcccaagctctcatgggggcccagttgcaccatgaggcccagggctgctggccactagttctatgttgagtggccaacatggcctgggctggggttcccctacctgtgaggtgctaaagtgtcaggtgggatggacactgctgtggcgtggtgacattgctaaggtgactattggagcaaatgacctcagtagccacttgcacctcgcatgctttgtggctctgattagatcattcatctccaacgtagtataatgtggggccacaggtgcaggtgggattcagaaaagggaaaatgtaggctggggcgacctcatgccttcatggggaggtgggccccaaacacttgaaccatctactcattttttatcaaaatagtacctgtctgtaacttacaaaaattaaatgatactgaaaggcctgtgacagaaaatagcagctttctaccccctgcgtcctcaagtgacccgttccattcctcaaagcaactacataccttcactgtttttactatttttttctagtggtaccaccctatttcgaatacagatatctaatctctaatatttctaatatctagtatactattattatactgttctttttaagtatatcaattctagtgatttcctgctgattttcttattatgagagagaagaattttgttctcctatactctgtcctctcaatataggtataccgaattttacttaaatgtttaatcagatgattacttcattaacgaatcctgctttccttttctttattttgcaaaaattcagattcacaggaaagttgcaaaaataacacaaagaattcctatatagccttcacccagattccccaagtgttcactttttaccatactcgctttatcattctccctatgtaattttattattttcttaattccttgaagagtaagttgcagacacagtgccactttacacctagatacttcagcatgttttcctaaaagcatggacattcttttccataaatgcaatctaattgtcatatcaggaaattagcattgacagaatactgttacataacctgtagacatttacattttgttaattgtcccactaatgttcttgatagctaaagaaaaagtttttgtttttttgtttgtttgtatttttttttttttttttggtttagaacctatacaagatcagactttgcttttagttgtcatatctctttatctcctcaatctttctttgtcttttatgaccttgacattttgaatagtacaagcaggccagttattgtgtagaatgtctgtcaatttgattttgtttgatgtttcttcataattgagtttgtgtactttttttttttcttgagatggagttttgctcttgtcacccaggctggagtgcaatggtgcgacctcggctcactgcaacctccgcctcccgggttcaagtgattctcatgcctcagcctcctgagtagctgggattacaggcacatgccaccacgcccggctaatttttctatttttggtagagacggggtttcaccatgttagccaggctggtcttgaattcctgacatcagatgatccgcctgcctcgacctcccaaagtgctggcattacaggcatgagccaccactctcggctgagtatgtgcactttttaagggaataccacagaaatggcgctgtgtccctcttcgtgcagctcatggagaggcacagggatttcgtgatgttgacattgaccaactggttaagatagtagcttccaggcctcactgctatgaagttactatttttctttttttaatttttttgagacagagtcatgctctgttgcccaggctgaagtggagtggtgcgatctcaagtcactgcaacctctgcctcctgggttcaagtgattctcctgcctcagcctcccaagtagctgggattacaggtgcctgccaccacgcctggctaatttttgtatttttagtagagatggggtttcactgtgttggccgggctgatctcaagctcctgacctcaggtgatacacccacctcggcctcccaaagtgctagaattacaggcatgagccactgtgccccggccccaagttactatttttctctttgtaattaataagtatcttgcaaggagatagttgagactatgtaaatatactgtttctgctaatactttcactcacaaattttagcattccttaatgattcgtgcctgaaatgtcatcatgctgatcagcaaatagtggttttaaaaaattccatctacatttattagttggctttctgctataaagatctttccttctctatttttcttttatctgtttatttatatatgttttggctcatagatttttattttattctaagggttataatccattactattatttattttgatgctcaaatcatcccagtgggagcccttgcaaactggcttctgtgtgtttctaaaatgtccccattattctttgagcacttcttgactttcaggcatgagaacttgttctgggcttatctggtattttctctgccccagccctggaatctagtgttatctaaggagccctggtaccttttaatgaatggttcttagaagccaagatcgggacctaggtgtgctcattgctgctcggttctcacgtttttttactctctcctccctcattccttgagtgcctgggttctcaggtcacagcttctgttattctgcttctccagaaataaactttgaatcttttgcctggtggtggggaccaaagtgtagtttcctggctatgtggaaagggaaggggacttggggagtctcatatttagacttcgatctggttctgctgtttcctgccaacacctgagccttgcctctcctggtacctggggcctgcaagctttgagtcctcggagatttgcagcctccatccatgcatttctcatcagtattcctctctgcacataacttaggttgcacctgtccccacactgccaagttgcccactcctccttcgtttactttctgtctttgcaaagtttgttgaaatctcttttcttgatctctgtgcttatgggggtttacaagtttttgtattcatgagagagcaggagttgaattaaatgcatgtggtcaatcctgtcgagtcagaagtctaatttgtttggatttaaatagttagggaaacaggaagaaggtcggaagactgagctctgtgtgcttgtcaagaggagcaacgggagcagatggtgtcgtgtgggagtcggggataaagcgatctgtcttcagagttcaggcaggagaactggcttgtggctgagccctggacaggttgtatagagaggataaagggggtgcaggatgtacctgaatgccagtacatagatttttttctttgctgttgttcaaagaactctaggaggggacacacacacacacacacacacacacacacacacacacacacacaccaagcttaccaaccaggagatgggcagagtgagcagagtataagccccagtcgtctgaggggcctgggaaaatctctgcttggattcagaccttacaaagattcagaccctacacaagagccaccagggcaaaagtgctctgggactcaaggataaggctctattgtcctcccctgcttaggattccagccacaccctgcctagctttgtatttgccccttcctggtgggaaagactcttcctcagcaagcctccagagccctgggagcagggctcttgtccgacaccacctctgagacagcactggtacgctgttggagctccatcaatcacagaaccagagaatcgttgctgaaattgccagagcaaatgtgaagccgactgtgtgcaaaggtgagcctgaaagcagcctcttcaaattgcccttaagaacttgtaaggcaccaggtagttgctggcacctctgtctctgcagccgcctgagtcccgctgtcctttgccgttactaagaaatgtggcccccacccccagtggtagcccagtcccagaaggtctcatataaagtacaagctgtccttgccttttgccaattcacatttcaacaatccacgcattctgcagttcctgaaaaccgcttgtgtagaacttctggtagctttaatctccttacttgggagttcctgctcatttctggaaatgtttaaataagcaagtctacccttaaggaaagtcaagacagcttttccagtataatacattgcatcttagtgataaagaggtagaaacctcagagcttagtctggttgaggcaaggccagtctgtgcacggttttgtcagctgctcctcctctcaagaacactaaggcctgaagggcaagggctctgggtgcatccttattacctggaagtgctccttttccagcagatcacctgcaaggattcctcctaccgacatgttgtcacctcagcccctgatgtggaggataaagctgggtatacttgcgatggggctggtgaagaagagagggtcagatgagggcaggctcaggtataggggtgccaaggatgggtacctagaccagccagagagaacacagaagacttagctgtctcaccatggtgcccagagtaaggaacagccagcattggatggaggaacaaagagatgaaatgtcctctgtgcatgtatcttgaaaagcacctagtcaccattctaaaccatcctaaacacgtccttctaaacaaggaaggcaaggctcccagtggggaagtgctgggccagaggccacacagctcactcagccactgacttggggcccagggtcccttggtcgctggtcttcccacacatcctgtagtttcttttataatgaatccgaatgattggtccttgtacaaggctcacaggacatctgtttaataatgtattctagaatttcctagagatcagcatcaagtaggtgtctttgaaaaggcttcatcactaaagcatctgcacagaaaatgttctgtagagaggaaagagggggagaaaaagaaaggaatgacaatcagagctgcctctctgtctctgcacacactcccctctctcatccaagtgagaactgcaagaccacataagctgctaatggccgaggttcccggggccccactcctcagccccgccatgccggggcacagagaggtgggggcacagagaggtgagggctcttccgaaagatgcggtggtgtttgggggccttcagacacaccctggaggaggaggactgccacagcatctgggcatcccgcactggcagttgtaccctgtcctcattgttctctgttctgcatactgggctgtgtgtcaggcctgtggcttcctttttcatccctgaaggaggccactagccacatggcgactttttgcaaattagaaagaggtgccccttcctcagcacagcctctgtctgatattgtcataaaaataactcaaatctatgaggacagagtggccgagtcacctcctggggttgttcaaagcatgcagaagcagcagcccgctctcattttaagtggatttcacatgctgcagcttgaattgaaggcttgggtcactaagtcattttctagaaggccaaactttgagttgagaacctttcagctacagagaaccctccgctgaagggtaatgtctaacagccaagaaggcaagtttcctccattctatttcttcaggaggatggagtcacgaggtcataggagggcccacctgaaaggagccttcatggttgtccatataacacagcccctttcagtctgcactgagccaaactcaagccccaggccagcgcagatgagctgaattctcaaggttgttgtgagtcagaggtcactgtacacaggagagagattcctgctgtccaggaggggctaagtgcaaaggtgactttcagggaagaaaaggtcactaccttcccctgccgcagttaactctctgggcaatgggtcctgggcatgaggcacttgtaaagctccccgagtgaatctggcttgcagtcatggctgagcccctctgccctaaggtattaaagacttatcccatttccccagtctgtgagatacttacatcatagaaaaataagcagttagccaggacttgatcctaacttataaaacattagttcagtagcttctgtcatcttgaaattgatcatgcccagccttattttctccctgtcctataagaaggtaggattcctcagagcagggctcatgtcttctttgccattgtgtttcttataggtgacactctctcccccatctccaccccaccccgtccttcaccaaaactcatcaatttcattctaaattttattttatttgggcgtttacagactctccttccatccactatggcttccctaactcctccgctagtcctccttgccccttggctgttgtgacagccccttaccagtctgccctgggtttggtttaaatcccctaaatccagtcacctctagcatgacctacaaagtgcacacatctagctagtttcctgatttgctccagcctgtccttgccttccatcacgtggaagacaagctcctctcatgcacggtcatcccaatccagcccctgcatttccttccaaccctgcatcccacattttccctatcttgcaccccatgtaacagcacactggactagctgtggagccctgagtacagaagggccaggtctgtcttctcctggctgatccatcatgacctggctcggggattggctgtggaaagtagtccacaaacacttaaggaacactctctcagcagccctggcgcaccctgcaacacgcacaggacccagaaggcatcctcccagagccggaacacaggagcctgccccgctccacctcttccaagctgcatggacttgaccaagcacctttacttccccatttcctcctatctaggatggagataataaaacctcctccctgcaaaccaccatctcagaaggctgtagtgagaatcaagcaagacaataatggagaaacttctttgaaaacagtgaggtgccagtcaaatctaagggcttctgagagggcagcagtaaataggtattgcacacggcagctcctggggcccactgggagccactcaccacgagcatggtgcacgtgcctgtgagcagggcagacagagtggctgcaacacaggcttcttccttcggtatttttataaagggaatcgggtgaaggaaatgtcttggaatagacaatcttcctaaactcccccaaaataacttcagtggaaacaattgtaacgtccactctgccggcattgtttcagtccactgtagtatgggaaaagtctcccggcatttccaactcaactgggaatccacttgacttccagacgtctagaaacaaagggattgtgcccaagggccactctgggtgttcgtggccctctggtgccgaagacaattccagggcctgtgtatagcttactcttcctctctccctccctttgggagacatatttgctgaagggctttgtattttcccatacataactttgtaggggtcgttaccaaaatagtttgttagaatacacttgagattctagatttccctccagtcagtcacacagcccagtgttccagattcgaggcctcccaatgctcagtgactctttgccacctgcaccagatagaatcagtcctctcctaaaaggtctttccttcttcctttctctagctgggaacaggtgctcatgtccccagtccttgtctggtcttcctgtctccccactccttctcttgtgagtctgtcctcctcaaagaaattgtccaagcatctttgctcactcctgtctcccctttccctctccctcccagacccaagtggtgacaccagctctcccctggcctgagacagatctgaagccctggaatgtttcttcactccctcatctattcttatcctccaccgcccctcacttgctgccccaggtattccaggacaatcctatttacctgccattttatccttttcttctttttgagacagagtctcactctgtcacccaggctagagcacagtggtgtgatttcggctcacggcaacgtctgtctcccgggttcaagcaattcttgtgcttcagcctcccgagtagctggattacaggcgtgtgccaccatgcccagctaatttgtatatcttttagtagagatggggttttgccatgttggccaggttggtctcaaactcctgacctcagattttatccttttcaaaaacctgagcttgttaattgtctcactaaatgagacttaagtttttatctttgtaaaacaaaacaaaaaacccttgctcaactcaactgggaatccacttgacttctggaggtctggaaacaaagggattgtgcccaagggccactctgggtgttcatgggccacaaaaaaacaaaaacaaaaacaaaacaaaaaacaaaaaacaaaaaaaaaaaaccacccttactcctatttctggctcaccatacacgaagatcagtttccttcttgcctggatcttgtcctctccacctctctgcctctaattctcccatccatcaaaatctctctcacttccccctctttgtaagaagtgtttcctaaccattctgctgggacattctagaatctttgctttctcagaacatggtaccctgcctcattacttctcaaactttagcgtgcatatgaatagcatgcagatctggtgaacatgcagcttctgattcaggaggactagggtaggcctgaacttctgcatctccagccagctcccaggtgagaccaacgcggctggtcctcagaccacactttgagtagcggaaccctacaacaatggttcccacattttgctgcacaatgggctcctgtggaggggtgggttgaaagagactggtgctagtcttccatccctagacactctgatgtttttagcatggagcttgacccaggcattgggattttaaaatctcctcaggtcattatactgtgcagtgtgggaaccactgccttattgcataaagtgaatatggctaagcctattattatttcatctgtgcttaccttgtctcgaccttgatagactacagccctctctaaggcaggacttggtcaacattttgttttgagcattgatagatgaaccaactgattagatattaggcccttacgtgcttttctgatgatgaatcggtgttaatgagcatatatgtgttgccacagagaaatgtactagatatcaagagggaaataaaaatggatcttggcagaccatggtgaaatctacccggtgccagcatcagcggagggtggcccaggctgtcctgtgtggcaggctccaagggctctgggcatgtttttggccctttcccacccacaagaggaaaaagaaattctacctctctggcctgcttgttctaaaaatactcactttttctccttttagtctgaggcagtggttctcgaccacgttgtagactcgcctggggagcttttaacatctttgatgcccaggctgcacccagaccaaatgcatgagagtctctggagtgggacctgggcatcgagatgttttaaatgtccccaggggctgtcactgagcaaccagggctgagagccaccaacctcaggtaaatgtaacccctttatcctcatctcaggtggactgaatttgtcaggtccttctatgaaggagtggggagagagtgtgagaaggctgggtacctatccaaggcagaaaaccagcacccagtagagagaagggcccagagagggaagacactgctgccaaatgcgccaggtctccaacatgtctccagtgcaagggtctatcggccatgatccacgcgccaagtccagccctccattggtttttataaataaagctttattggaacacagccacacttctgtagctgtttttgccatacagctgcagagctgagtcattgtgacaaagaccttatggcctgcaaagcctaaaatatttagtatttgactctttacaggaaatctgctgatccctgctctagagggttgaccctgcatagactccctaactgcagtttatgcgttggtgcctatgcggggaatttttaaaaccacattttggactttgtgtaaatttttagttgctcttaaaacagagcagtgtcctggtggctgtgctgacaataagtcctggttggcttccctcactcagctgttggggtggcaggtgctgctgctcccaccctctggtcccaaagactctctttggttgccctagggtgcccggcagatgttactgttttctctgcaggctgtgagtcgggggcttgggaagccccatatcaaaacctagtagatgtaagaagttagacactctggctaggaatggacgctattcctgcccaaggacaatggattcaggtgaggagggctgcaggaggcagaggctctggagacagagagcagggaggggatgagagctgccctcagtcagagccacaggaaccctggcagtggaggatggccaggaagcgcctaaagactgagcttcaatatcctgagtccaggttctcaaattctccgccattccttcttgagccaccgctgtgcccctgaaagtaggtcagatcactgtctgctacagagccatggtgggaatgagataccaactacgtcagcagggccactattgcttagtgagcctgctggccagaaccaatggctgcccaatttaagacaacccataaagacctttttatgtggtgcagactctttaatgccgtgcatccacacaacaaaagcttagcactgctttctgggaatggaacaagtaattgaatttctgaaatgataaatttcactatagtcagagagaatggtacaaccagtctccttaaagcatctggattctcttgtaaaattaacaagttggagtcgattgtctaatttactaaagatatttggaacaggacttacaatttcctagtatgcttaaaatacagttccacacagagatttttctgcatgcaagcagctttttaggaactcatctttgtccatctaatctttcttcctaattggaaacctctgtaagaccttatcctttgtcatttctgcaagttcctcatgctttttaaatttttgaccacacacttgtcagggagatctattatcttcttctggtactgatcagattcacatgaagcagcacagctattttggaagcacagcacagaatttggaagaagggagagggaagaagtgaggtgctctggcacaacccagttacagcaaccttgtaaatgtatgcattcagtgctggaattgtttacagagcgagtgcccaccacaattggggctaaccctttctgtagcttgtttaaagccacattcattattcattcattcatttgttcactccatcaatcagcatttgttgagtacctgctatgtgacattgctgtgcagagtcattataatgggatctgggggtctattgccagagaaagggaacccacgcacacacttctggatgggcactcgctgccgtcagtgctgggtctcatgactgatgctcttatgagcattccgctacggttcaatcctgagcctcatgggaataggctttgatgttagagaactgaggtgccaccctagttccattgcttacttgctgcatttctttagacatgctgtttagtctatccagccctccttttcctcatttgtagagaatagataatcgtagtacctatatctcagggctattgtgaggtttaaattagttactgtatcagaaacttttcactcagtgcctgcctccatacattacagcccgttgctatcattatgatagctcataatccatgtagacatcatttggctccttctatggcgaggagactttctgaacaccttccaggaaactggcattgctcagtcaggagaagagcgcgtatttatcgggcaggactggaggggaaggaaagagttcgcagggaacttcctgccattgttgggctgtctcctccgcatgtgactcggctcaaagatgcccaagcctggtcttgctgtctcctttttctttatgttcttgccactctgaggtatcctaggaggagctagtagaaccttttgaaaacagccaaggagtgtcacagatctggcaggtttcgtgcaaaggcccaagccgcctcccacagatattccccctctccacttcttccccagctgtcagtctcattagcatctgcaacgtgtaagatgcaattctggaggtgaagcttagggctctggcatggggcggggggcttaggagtccctggagtcccctagtctttgcctaggctatgggcccagctgtgatccagagtttactttcacctccagccctttcacatcagtagacagcacaaatctagggcagcgagcctgtgtcttctataacccagtagaggccattggatgggacccccctgttggtgctgactggggtcacagtttgggctggcctacctccttggaccctgctgcccatccatcgcagggtggaactcctggtctcaccgtcccggcctgtgttactttgtgtgacccccgccagacatattgctctctttatgggtaccgacaccgctcttagtctgtctggcttgagctctcgggacctagggtccacttggacccttctctttgcaagctgatctggcttgagcatttcccatttgggttcagcaaacatgtaatccagaactggccaggtgtgtttctatctgtcatctcctttggttttcagcatctcatttaattcctacaacgaaaggtaggtattagtctctccattttcaggcagaggaaactgaagcttagagaggataaatgagcagcatgggtgcctggccaatgtacctgctgccttgctgtctcagaagtgagacacttgttacacacagggggcctgtggagctaagtagtgggcctaagcatctgtggtgtgttgtcaccatgcagccagtgaatggccacctttgtcctcggagagcttacagtttcactgagtcctgggggacccaggtctttgttaccttttccctttaactgaaggagagctagcaatcactaagcactgagccttatggttagaggacatcaaggatcctggcctcttgcagagcaagagatattgcctagttaaaggccacagacccctgggcctctgggccaccaatgaatgctcttggtccacagtggatccagtaagaatggcccaactctggcctgtcaggacagtggtcatcttaactttttatacaacaaacaattatggaggctcatggtatctaaggcactgtgccagacactgtggggcctacagaagtgaaggaagcatggctcctgagctcctgaaagtttgtagcttgtttggggaggcaagcatttaagtaactatctagaccattcagacagcaggatggagtactaggaagtttgtccagtgtgctgtgtgaccagatggattccttctcatgggaactgggatcagctttgcatggcaggggcatttgtgctaatggtaaaagctgacagaattttaggggtaaacagaagtgggaagatgttccaggctgaagacaaagcctggaaggaggagtgtgtgttcagggatggcatggcaggtgcacagggaaagggaggcccagatggtccttaaagatcagtggctgaccattctccagtctaactccaaatgccagggcaggaacccgggtatcctggcccccagcccagtgctccttctgctgcattgctgtaaatagaagtttaaagtggttctcaaggccagaggggattggggagcaatccatttgctgaagcttttcctctggatgggcttctcctgagagatgacatgtgagggggtagtgagaatctaagggatcacctcctcctgataagccagaaagcacctccactgttgggaggctgtgatgcagccagaaatagtgatcctgccgttgcatcctagcccttgagtccatcaccccagccctgcagtcctgcagtcctgaagcacaggatctgatcccctgagcctggctcatgcactctggccttccaggtcaagcgtggggtatgaccagagccaggaaccatgtggcactgcagggcaactctctactcctccctcctgaaagtcaactcagtggaaaatgtagccatcattaaaaaaaaaaaaaaaaaaaaaaaaaaaaaaaaaaaaagcaaactcccctctgaaaaccctatggatgaagggagcacttgaagggaacaccaagtacacaaggagaaaatgacaaaatgctgctttcctggcctctgctgctgggcagctgggtgattcagctgcaggggctgccctcctggaacctgtcgcaggagatgccccggctgcatgccaagctaggagggcccagcagctggcatgggactcgcttccatcctggggaggcaactatgtatttatcttattttcagagactgagtctccttgtgttgccccggctggtctcgaactcctgggttccagtgattctcctacctcggcctcccaaagtgctgggattacaggcatgagccactgtgtacagcccaattctccatttttaaatttactggtttatgaaatttgaaatgttgggcaccactaatttaggtctacgactttatttaaagaaactctaagcttcacatattaaagactaaacagaataggaataccctatttgttttctctcagccttgaatctttcccgatcttttcaacctggtcattctggtctggctcacctgtccctttcttagggaggactcttctgatgccctaatctaaagcattatccccttcctatggtttggtttggttttgagcacacttgtttctgtttgaatgaccttggtgtttttagctgcaggctggggactgtcatttccccttggtagagtggaagttcctctctgtggcctaggtcactgtggcatccccagcacctagtacagccgctggcaccacataagcctcagcagaaatgtgttgcctgaatgaatgaaaccacggattggcttcctggacgaggacccacgtttcaaccctctgtccctccagcaccaaggctgagctgcccctgctggttctcggtcagacctgaggagagaggtcctctcttccccactcttcttatctgtgctgtggctagcttcttagatacccccgagcctcctggtgcccgacggccccagcaggctagtcagacccagtgtctcagtcgagtttcttggctgccgaggcctgaaatcttcagggcctttgagtaacattctgcccttgagcaggttcacagactggctggtcctctgggagacaggcccctccctggctcttcagagcctccttgcagcttcccctcttctagctctctgccttgcccagagtcctgtgatgagatgaggggagggattgggaagtgccagcatggggctggggctggggctggggctggggctggggctggggctggggctggagccgggtggtgcaggtctgtgtggaggaagctgaggttgcagggactgctttggcccaagagtgtcctggacacggcctgggagcttagcaggtggttagttgattaacacaggtatgaccacattctaggatggttttggggtttgggcggctgcttcccagcaggtgcacaaagaccacagacgcaagtgcttacgaagcctcaggttggaggccttcctagcccaggggtctccacatgcagcggggcattcttgagctgggctgtcgacatgccattcatgcccagtcatctcatttaaccctcgtaacggtcctctgatatgcgtatgcttctttattaccaccattttttaggtgagaaaactagaagcttaaataaggtaggcattgctgccagctcctgcggtaagtggcagtgacagcatctagccaaaacgtttgatgcctgatctctgctcagggcacctggatctgcattgctgcagtcccccagctctccaattccacgtgagcacactccacactggctcggcagatactgagaggcaggtcctgctgctctcgccttcactgtggcctccttatccatgctgatatggcttggctgtgtccccacccagatttcactttgaattataataattgccacgtgtcaagggctgggccaggtggggataattgaagggagatggtttcctccatgctgttctcatggtagtgagtaagtttcatgagatgtgatggttttataaaggggagttcccctgtacatgctctctttctgctaccatgtaagatgtgactttgttcgtcctttgccttctgccataattgtgaggcctccccagccatgtggaactgtgagtccattaaacctctttcctttataaattacccagtctcaagtatgtccctattagcagtgtgagaacaggctaatacacatgcctgtggcctctccagccagctgtgacctaccagggcagacagcaggacagtgatgaacctgttcattcatgtgaggccttggaggcttccccccggcacagcggggtacacctcagaatcttagcatggctgcgcaggtggtttaggcaggggctccctccctgctacccacagatgcccctgccctgtgcgaacgtgactactgctagtttgtataatgagctgcagcagagtgtgctcagaagaagcagagcagagcccctcaagcgtgggccgtgcctctctcactctaacctcagagcctctgttcacttcgaagggtgacctcaggcatcccttcctccacagctccttggaccttggatgttcttccattgtgactccactcaatttgcgtgtccctcttccccagggcccatgcccctcttggagacagaggtggagtcttgttttcctgtgtctgtgcacacagcatgctcacagggcaccgtgggcatcctctgagggtttgttgagcatcactcctcttctagagttggttgatgcttcagttctatgatggtctttgaacctcctcaagtacataaaactcttcacaatgttgcccacttctcaacagttgtcatttcccccttagaggccagaacgcaaacattgctttgccttctcttgagcttgctctctagagttcttgaggctctgggtcttatctgtgccatagacacaccacttcatgaggggccaggacacaggccatatgtgtctcatcatgcccaggtggttttttcaggggctgcagaatggaaactctcattcctcatggccctttgtacctctcacatttcttgggcgtctttctgcccctggtctgcagcagcttgaaggcattgccattttcagttcagaagtgtgtccaggacccttaatagatatccattatccagggaatggagcatgtcagtccactccagttccattctcttgtgcgtgtcccgtgtcaatgagcagcatgaacaccatgagcctaagtggcctgtgttcaagtctttcctgggttcatgacctggagaaggcccgtagccttttggtcccatttggtcttcgacacagagagtcacagtcatcctccagtgcctccgtcccccagccacactgggggccccccagcccccagtgcacacagtgcactcccttcagtgcactgtgctggctgcagaatggaagcctgacaatggtagttgaagaagtggcattttactaattgtttcctgtacattttaccctctataatgtagaaacaatcttctaacacttccctgttggtccctagtccctgttctttgcatcagtgtcctcacctattttatctgtttattcagaaattaataagtaaatgtcatttgtatttgacattgcctggtagattcctcctgacatggctacccgtggagggcaataagggaggggccatgtctgctttccatgacttcctggatataataagatcagccccactgactcctaaagttgtatcatgttaaattatttaggacttttttggttgcaagcgacagaaacccaactcaaagtattttaaacgtaaaaagaatttgttggctcatgaaatcaaagaaagtcttaatagtgtggcaaaggaggtaggaagagcaaatattttcatcctcattttacacaagagagaggagagggcagaatgggatattaaaagaatggtccatggtgatccaggcttagcgacagctaggatccgggtcacccaaagggtgtgtgcagtttattattcaggactctttagactgttacaataagaaaccctgttggaaggaaaagggagagaggggtggttattcccttggagcatccaaggaagtcttgcccattccagcgacccagcctctggaaccgcagtgctgtgcagatgaaaaccatctggatatagggtgcatgtcataggctctcacccacaaggctaccctgcgcaaaatattcacgtgcacttttaagggggtcgtggaatccactgaaacctgtccggggttcctgagtgaagcccttcttctagaaaaatgtctagctcattgtgtagctagcctctgggatagtattgagagcagagcttttcagaatgggtagagttttaggttcacgccacagggcaccaatgtgtggcaggtggaggcaggatgtgtggggtgccagggctcagcggcagcttccagaaattccatgtttacttttattgtctatgattttatattagaacttcagctaaggtattgtttttaaaaggatctctgctgattaaaaaataataaattaaaagttagaaaaccacaaatttaagcatgggtgagcctgcccacccccgactttcctttctgaatcaggtcaacttctctgaatagctgtgcagcctagagattccaggaattttagaaacattacctatttatttctgcttggacgtgacccacacatcctgcccacgtggagagagaccttggtaggataacttcttagaaaaaaaaaaacatgaaaaaccatgacccccagcaggaggaagcctctgctgttaagacaagcttattgtcagaggagctgtgcttgggatttttatggtcctttaatcaagtgctgtggttcctttgtattgttcaccccttgggatgtctacccaggttggggctagagatgatgggagtctgcaagtcctgagctagcagggtctggacttggcctgaggatctgccctacctccatggggctcatgctctctgggtatgcccagggagtgacagaaacctgatgtaatcaatatagaagcttgtgaagaagagggggactgtagcttccaagaggccagggcagagtggatatccaggcactgtgggggcagacaggtgatcagctgggagggagcagggttggagctgcaaggtgtgcctggtgaggagcccggtgtggccacctcctgcctgggacctcccaccccttccctggcctgggctaggatccccaccactgcacggctgcaccacttccttgcaaagacaagcatttagtgtagttgtttttaacaaagcaggaggaagactttcttgtgtctgtataatgctttcttccttttcaaaaagctgctgtatgggagagagagagataatagacctagagatagttaggcttggatgatttctatcagacctaggttcgtggtcaggggtcagaggtcaaagatcatgagactgtcaggaagattttccttgaaggttaagtgggcattggattctatgaaagtgcaggccatggaattgagctctgcggggcacttcaaaacctcattggggcaggggcagcagcccggggactccccctccaccaccaccaccaccactccagcctgtggagtgaagggcagggtgggcttggtggccaggaatacccctttctggagaggagaagggaggcgagcaggtgagcctgccaaaagggctgtggccagggtcatctctggggttacagcaaggatatgccaggcagacacaggaggctgtctgaaccagtgcctgccagacgccagctctcccacttctgggcctggggggaagcgtagtggtcactgggagggactgcctgtctctgagtacagaaatgagggagggacttgctcttgtccactccctcttgcttctagaggcctggggagcatggcggagcaccacggggtctatggtagggtgggagagagctctctgatgctcctggggggttggcctcccatctctgccctggtaccgtaggccatgtcacatcaccattgggaccatgtgcctcagagatggaagacacaggcttcctgctaactggttgggcctctgtgggcaacttctttgacctcactaagccttctcttcctcttccataaaaatgggctggatatacagtggaattacctggtgagcattcaacatatacaaattcaaatctcaaattcaaattcaaaatttggcaaaggaaatatactcagaaaaatatccctcccagcctgggtgattttgcccaccactccacctgggttagtttcccggggccgccataacaaaggaccgcaaactgggtgacttagaacggaaacttcttggctcactgttctgaaagcagaattcccacatcaaggtgtcggcagggccacacccgccctaagatgctagggaaggaccatcgctcccttccagcttctagtagcccctcagcttcttgcagtgtccccccagtcctcacgcggccttgtttttacaaggacatcagtcatatcggaccggggccccacacatgcacattccaatgtgtcctcatcctaacttaattacacctgcagtagccctctttcccaatcaggccattcagaggaaccaggggttaagacttcagcgtaagaatttggagatcacacttcaacccatgacatcatccagaggacccttggttggggaaggaggaagcatgggagagaggcacaggcccctcagggtgggcacatctcggccccatgtgaggactgggtagagacaacaacttttacaccagaggcccctaagtgcatgctgaccacctcggctggcaggcagtggtggagacaagagccttttccagcctctgaaggaattggtctatgctggacaactggtaactccactgtggtctccagggaagcaggttcatccttcagggagggtggggtaatgggtgtccacgggcacagcctgacccattgctgacggcaacagcagtgcatcatctcacagtctagaggtgttggccgggctgcgctccttcttccaaggctctaggggaggagccttctgcacttcttcccagcttcccgtggctgccagcaatccttggcactcctgggcttgtgtctgcctcactccaaacactgcctccgtcttcacatggccttcatccctctgtgtctcctccatctttctgtgttcaagtttacttctcctataaggacacccatcgttggatttagggcccaactaaatcccacaggacttacttcatcataacttgattatatcttcaaagattctattttcaaataaagtcacattcacaggtgcacggggttaggactccaaccagtctttctggggaacacaattctacctcctgcggagggtgaggaggactttacagatgggatcacaccaggactttacagatggggtcacactgtggtcagcatcaccagcaacggtcctcggaatgccagggcttcacctctgcccaggggcccagcccaactcccggcactcagcccatgatgctgctgccatcggcctgccgggttgaggttgtggcatgccctcttctcctctcttgtgccttgtcaaatgccttagagctccactcaactatcacccacctggcagaaccttccctgactcttctcccaagaagtcctcggtccttcctatgggccgccagaggcgcccgttcaacttcaactatcgcacatggcacatatcagcttctttgtttgtgttcccttgagttcccctaggcctgggacagagtcttattctcctgatattctccatcaggtgcactgttgcatggcgggccccctacatttgtcgagtgagagagagacaagggtggatggatgggggcatgggtaggtagatggacgtcaagtgttacctgaacagagaggtcttccctgacccctccacccgtccctctctcatccccttgccctgttgtgttttgctccatagcaaaacatagtcctttatcatatgatatactttgttgcctctctcctttcattagaatatgtgctctgtaagaacaagcatattgcctttctatttcagtattgtatccacagtgcctgaaacaacaatatttatgagattgcaggtgcatggagggatgggtggatggaggcatagacgggtgggtggctgggagcctgttgcctaggggaggtgtgtcactcctatcacagtgtcagctggtcacagagccacccggcacaatgctttctgctcactgtttgttttgccctccctccccatcccctcacccccagattcaagaattattatttttttatggctgtcatcacagggcaaggcctcgcactctctgcctaggattattaactatctggggctcatgttctggggccagagctctgctgggcctgcccttaatccctcagaaatacccaccacactgggttgtgagataccagcctcagcctgccctggagtgggctgattttacataacatgtttttgcaaccagagcaataacatgccgcccctcagtgtcatgtcttctgcaagcactgacctcaggacaggagtgtatgtgcacgtgtgtgttccacgtgtactctgccggcgctgcatgtggaaggagtattagcttccctccatccctggagaggcttggtttatataatctacttgtctctcaggcccatttagttaccggaagtggtcagatgttagacagacagggaactgcagccaggtctcagagctcaggggagaatggttctcatgcagagaggttggggaaaagcaggcagggcctggtgggtagtcccagtgtgctacagaggcacatctgactcaggtagaccagacagccaaaaagccagctgggaaacccaagggctggttctctcatgtggggagtgcaggaggtggaggggatacttatacctggactgatgtctacatggggccctttcaaagcacatagtagaaggatttgctgagcaaagaattaaagcaaagtccactgtatgtgcttttaaaggatacatttcccatttaccattcaagggatctatcctttttaaaaagcaaggagaggtctttggtctaaagccagaatactatctcccctggccaggccaccagaagcaacaacttatactttttccagatttcaggaacgtattggtccttcctgtcattgggtgccacttgtcttggacatgccaccttttccagccgcatcttaacagataatgttttagggcagctgtttccttgagattaactggtggggggcacttttcattttgattgatcttctcttcttctcctcctccttcttttccttgtcctcctcttcttcttcttcttcctctttcccttctcctcctcttccttctcctttcttcctcctcctccttctcctcttcctcattctcctttttttcttcctctgaacacatgccattccctctacctggaatacaccacccccagatactttttacctttttaattgagatataatttacataccatgatattcaccctctcatagtatacagcttagtggtttttagggtattcacaaggttgtgcaacgatcactactgtctaattctggaacgttgttatcaccacagaaggaacgcagcatcccttagcagtcattcttcattcttccccttcccagcccctggcaaccacggatccactttccatctctgcagatatgcctattatggacgtttcttaaaaactgaaatcatgcactccgtggtcctttgtaactagcttctttccctgaacatgatgttttcaaagttcattcatgttgtagtgtggctcagaacttccttcctctttatggccatataatactccactgtatatatgtaccataatttatttatccagtcatcagtggacgggcactaggttgttgccatgttttggctcttatgaacaatgctgcccagaccactcacatattaccttacctctcaccaatgactttaaagaagctctgccaacctgcatgagctgcacatctggtgacaggtttgtgactcagtacagactttctcctttcttctgctggcctcacacttgccccctgttaacacccaagtgttcttgttttgggaggagtgtaggcagcaccctgagttgtatgtgtctcttggtaccagctaccatcttgagtttgaagaacaagatggctgattttgaggggttctcaatggagcttgtgtcaacacagtgccccccattgcatgcaggaggaggttcccggtgctggaagttctatgtaaaaggccccagggaaggcagtaaggtccattcacttatccacctagatgccacattgaggctgaggccccaggtggccttatacataggaccagccctctatagccctggcctggattgttcctggagagggaggacctcagagggtgcaaggctttgttctgtcacctctgtcactttgttccactcatttttcgcctcactatagtcttccagccccaggccaaaaacagcataaaatagagcttctccatcctcccccagcacaccaccctggaccaccaggcactgtgcagattctgtcttccttccatggcctgagcttcccatgccctccctccctgcaaatcacttcctgctggactcttttccaaggctgggggctccatgaggacaggtgcctgtgctgccttgtttgtcctggcacactcagccctgagcagagtgtcaggatcacaggaaagataacgatgatgatgatgatgatggcatcgatgacagtgatgatgacaatgaggcttactatgtaccaagcattatcctatgttctttacatgtttctgaactcatttaatcctcacaaggattctagcagccagatgctattatctccattttacagatatggaaactgaggcacatagaggttaggtcatctgctcaaagtcacacagccatcaagaggaagagccaggatctgacattcacagtctaactctagagcacaggcctctaaccactgtcatggtttatacacatacactacatagatgtgagttgttctgggatggatggatgggtggacacaggggacctaacagtggcttcatgagaagccccgagtggcccggtatgccccattgagccacactgagtcttgggacagggttagctccccatggctgctgcctgtgtgcaggtaaggaggccaggaggtaggttagagcccagggctggaggcccacaccgaggaggctggcaccccctgggctcgtgttacactaggggctatggccagttccctctgcccggcctcagagccgagatcctagtccctgccgccgccggtagggagcctcggcttcctgtccattgtctccttggggcacacccggtgtgttcctgaagtgacctggagaggcagggagggagggaaagagggaagggggccagcccagagcctagtcagggtgggagaggggaaacgagaggggaagacttggtgtttttccttatttgtgttttgtattaaagaaaacaaataatatcctttgagaaaaccattaaacaaagcacatcctaaggccccagaggcctattgtggctgcctggagcccggaattcattcatgctttcttggctagattgttggaggcaagagagacgggggtgagaggaaaggattgttattaaaatgtattttgaaatgtgttgctccctccctgcactcaatccagtccaggccaagtggccataactccaaggtccctgtgtcctcctgagtctgttgttctcccattacctctctgggaagctccccaaaactggccagtcccagcatagccagggtggtcagtttcccccatgagcttgggggctgagccccgtgaaggcaaaacagtgggaccctcctttatggaacctgaatcccgagggctgcatgtgccccaccacagggtgtaacccacaggactatgatctctaactcactgtgtggccactctgggccttgggctccctgcctgtaaggtggggagtgggccaaaatagaccccctctgactgctctccagcagcctggaccctgtggctccctgtcatccagcgcatgctcaggtcgctgcaggtgggtgggagtcacactcaggctatggcctctgcatccaggcctatacccaggtgtcccaggtccaagccagaccactccctcccacttgactccaagccttggtaccccctactccaccccaggccgctcataatggaatggtagtgcatggtggtgctctctgccatgtccacaccagaacacacttttctgttggaggagggatgggaagaggtggtaagagcagagctggccatcagcccagcttgtgcaaatagctctgcctgtgatcctgcatttgcaggatctgccctgggttgcaaatagagggtctctctccaaccttgatgtagatgtagaaatagttgctgtcatgatgacaatacgcaaaagactatccttagaattttccccagttcctcctttaaagttgaaaaaggagcctgggcaacaaagtgagaccccatctctgcaaaaaatcaaaaaacaagccaggcgtggtgatgtgtgcctatgatactggctacacgggaggctgaggaaggaggattgcttgagctcaggaggtcaaggctgcagtgagccgtgtttgtaccacagctcttcagcctggatgacaaaacaagaccctgtctcaaataataataataatgatgatagtaatgctgaaaaagtaatttagctaattccatgttttcctaaatactccctaggcaatatagggaaagaagatcttgggtaaaaatttcactgggggtgcctggactaggtttaggagacaaatttcctcttcacagggcttagggttttcaggcttcacctccttggtcctctagcagcccagagaagaagggtaacattcccattgtgttatggaacttgtgcttagagaagtaacttgtcctgggatgcacagccagtgagctgcagaacctggccccagctctgttgctcattttctgcaaaaccttgaaccagcttgttcatctttccagatttgaatgtctcatctgtaattcaaggacttggacataatggattctaaggtcctcattgtccctactgttctttgattctgtaattccagcatcactgcctggtaggaagttcattgactctactgtttttcctttttcagtctggatttggtggttagagtctagtctctccaaactcttgatgtctttctgtcttagatgctggtgtacttagtgcagtcccagaggtgctttgctctctttcaggagttactaatgatcccccttcctccccccatgacacagggctaccacccgatgccccatgaagtggagatcgcacacaccaagaagctgttccgcaggaggagaaatgatcgaaggtaggagagacttcgtcgtgagctttgggttttcctttcctgcttctgccatctgtagcgacgtcagctttggcctgcatttcgcttttcccagtcaccagctgatcctgatgagatggggttggtggcatcgtgggttggttactggctggggattccccaggggcagagtggcggctccacttctcttgttggcctagggattggctcccttcaggcgtttggctgagagcccaccatcaccactgcctcttcctgggggtcaggcagtgaccaggctttgcagttcaggaggaaaaatgctgtttccgctgacctcaaagcaacaatagtggtcctcaaaaaataggactggctggctgtgtgttttgagacatggcctccaggaggctcctggagctcacaagtgcaagagtatctgttttcctcctccctggtcattgggggttgtccctcatgcgtgctggctctgctgtcacaggcaacacacagatcagcaatggcacatgctactgctcccaaattcctgggggaacccacttaaactaaggcagaaaccgagatctcctgtggagctcagactcccgagtgacaatggggccaggaaaggggcaatgaggtagccctggataagaacatgcagctgaaattgagcatcctgggaatgtgtgcatttattttcaaaaaggctttcttataaggggagatcttcaagatatattttaagtggaaaaaattcaggtgcagagtaatgtttcttatgtgtggtcatttatgcaaaagggggagttagagtatattttttgcttgaacatgcataaattatttctggatggaaataccaaaaaaagaacgaacaaaaaggcttatgcctcaggaattaaaatgaggtgttcctctatagggaatatattcttagataaagatgacggcttttggttctacctttaatgaacagagaatgttctctgagggccaagaaacagccggtggacatgccttgctcagaaccctagcggcgcctgtgctcaggctggctggccacctccttaggctgagaccagggtctctgatccttccctacgcatgcacaccctgaatagggattattaggtggtgactgcaactctcagggtggatgtaggcctgggtgcccagactgctttgtcatccactggtggattaagtggatctgaacacattcacagaggatggcaaatgtataagtagcttgggaagaaggcagtgtcctggcttagaaatcagaaccaccagacactttctgtagaagcaccaggcatcaaaaaggaacactgagcaggaagaggtggacccaggcctgttcctgccttgaccagagtacagtttatcgcatcgtgtgtgctgcctttttgctgtgcagcatcacagaggcaaattcctggtttctgggttcctggtagagggaagaaggaggcagcacccctcaaggaggaatagggttcacaggggcctgggaggtgtcagagagagcaaaggctttatgtcctctgcctctggccctgtagtctctgatggcagggaagacccagagtgtgtgtctgggaggtgtggagagtccccgagcttcctgatgagaagtcaccctctgccccacctctctgcgcccaggcaatggcaggctgccacccagcatccaggtcagcctgcatgtccatttctgggccaggtcacctcactcagcaggaagaccctggacagtggcaggcctccggaaagcagcagcgtgacccagggatgtaggaagaggagcgcggcatgcaacggctgggaagccgagcttccgctgagctgcgctcacattcaccaatgtccgggttaggtcagcacacctcccaaaggatgtggacgggccagggtccaaagtgaggcaataaagatgattaaaggggtggaaagtatgtcctgtgaggagtgctggagggctggggccagggaagaggaggccggagggaaggaacatcgtgccgtgaaactcatgaaagatttatacggagagatgaggggccgctgcctccatgtccacagggacccagactagaggaagtcagcttggatggaagaacagagttttcagctagaccgaagacagacttatggagcaaacatcttgaccatttggggcaacactgtgcaagtcagagcagcagccatgcctgaacacagagcgtgtgctcgtcggggcgccccgctctaattcctcttctagatgcggtagaatccgttactcactcacagcctggagctgtcgtggagtcctcaggtgatggggactttcaggaggaaagcaggcagccatatagtttaaggacctttttgtctaaaagcaggggtctcctgagtctgttttgggaaatcgtgggattctgccacccaaagagccgctgcagaatattatcaggtgacccctaaccttcccagctaatgacccatagtagtagccttgctaagtgtcaaacctgcatatttgaccttggaagtccatacttgtgtgcagcaggttcaccttcctaatattctgggcttaaactacactgggaggggcttgcatttcctgggcacgcatggtggcaaagggagaagtgaccagaatcagatttggtggccaaagggcacagccagcatctgtgccatgcctctgatctccccccaccatatgaagggaaggggccagctgtatccctctggtggcttggtggctctccttggaatggagaggagtctgtggctttccatcttcctgcaaagtggctggagttggtgtccgatagctgcaaactccaggcagcatgagcgtgctgctgaagctaggagcatgcaatttcccacagcctggagcagggattttcagactgggacctaaagtcctaggcttcatcaaagtctgtgtcccatcccagttccagctgcattctcaggggtttttgtgtgccttactgcttttattttccacttgtttaagtctgaggctgttagcaagctgaattatatagcagtttagggacatgccctggaattaggagctggatgggaatcccacctcctctcctcactcaccctatgatcttgccaattacatcacttttgaaagccctgtcccttcttctacaaaatgggttcactagtcagggagctgaaaggagctgattctaataaagcacctagaaacacggtcttagtgttggcccactctgcaggtcagagggggtcctaggtgctcaggaaggctttcaaggtaagtgtggagcacaggtgtctgcagtgagcggggagcttttgtcctgtgattgtggcagcaaacccggaaagccttgccctgcattccctccaggggcgggccgctaggatcaattgttccttcccctggatccacttttaaagccctacccacactgtcagagggggcagagcctgggctagcagggaaggaggccccttcagagtggtcacctgcagactctgctcctgatgccatgggctgcgtctagtgaattgtggatgtcttttttccattttgaaaaaaaaaaattaagctcatggacagttcaaaggtttcctcaagaatgttcttgacatttgaacaactagtaaccacttgtttgtttttggaagctaagaaaagacatttgctgatttcagacaaaattatgcattttgtgacataaatgtgctaaatgagtgttccacgcgttcctcaaagagcagcatgccttctgatgctctggccccatgcaagttggagacctgttgcttggaacgggggctgctaaggctcgttcccccccttttctcaaagctttctgcccagagcacatagaccagaagagcaagctcactagagggctggagacccggcgcactgcccaagttgaccctgagtgaggtccctcaccgctggggaggatattttctctccccaccacaccctggctgcatttaagagatgaacacattaaggcaatgaatggatgttgtagcctgagctccctgggaagcaggctctgggacagtgattatcagcagctgcttttaaaggcatgcctttggtgttgatactggtagaagatcaaaagaggaagtggtatcagcagagagaagttgggctgcagtgcagtcttagagagttctgagcctgtaggggaggttctgaagttgggctgactctttaagagctgtcccaagatggggtaaaggggcaggccttgatacctccatgtctgttggtcatcaggcagggactgcccaaggaagggagcgttaccttgggcggggctgcgctctttgcccagagcagttgtcctaggggttggcagctgagggctgtctgcacagcacttccagcagccgggaggcagtgccccgctcctgaatgtgtatcacagcagacactgcagtgaagcactgttcagttctcctactgggattggttgggctgtaccctgtgccataagctgtgcccgagaatacgggaagtatagggtgtggcccctgctctcgagggcctgagctgtagcttgcacaatggtgccttgactccagaagcaaccagaacgctgtgcatgactgtcagtcatccacgtgttaacagggaggaggcttagagaaagcagccatcctgggagatgctccagaatgcttcctggaggaggtggggcttgaactactagtgagacctccaggaggatttgggagatgggagggtgttgggatgagaggagcggtgcttgctgcctctgtcctgtgattgaccgtgactgtggcttggtgtcctctaaatgctcctctgcatctaagcaggctctggagccagggattccccacatccccagaagtcgtccccacatggctccctagaaacagagccatgtgggtggtgctcacagcggccaccacccccaattgaactacatagaagggaaaagccactggagcctgccagctccagatgatcccgcccgactgtcagcaatgtcagaagaccctgcaggctccaaagcccggcctcttaaccatcagaagaggtggctaatgtaggcattagtggtccatcgcaccgtgcctgtgcggccagggagacaagagagccattctccaaattaatttgtttcattaagtgaggtctcggaatggttaatttactccatgtgcaaagcagattgaaaggaagaagagaaaaagaccttagccagcccagctagtgtcagatggctccgcaggactagaggcaggggagcgagccatccacctggcgtgcggagtgggccacatgctggacgttgcagggtggccacagcctacagcagcgcttgctgcctctgtcctgcgattgaccgtgactgtgatttggtgtcttctaaatgtagaaccaattaagaattttggggccgggcgtggaggctcatgcctataatcccagcactttgggaggctgagacgggcagatcacctgaggttcaggggtttgagactagcctgatcaacatggagaaaccccgtctctactaaaaatacaaaattagccgagcgtggtggtgcagcctataatcccagttactcgggaggctgaggcaggagaattgcctgaacctgggaggcggaggttgcagtgagccgagatcacgccattgcactccagcctgggcaacaagagcgaaaatctgtctttaaaaaataaataaataaataaataaataaataaataaataaataaataataagaattttgtccctccctctcttcctctgccaacgtgaacccagaccctaagtgtcagtcatcagattggatttttcaagctctctgtaacatcatctaagtcactgataaaaacaaacaggacatatggaactttgtgaatagactaaaaagcactcaattatatactttaaaggagtgaattttatactgtgtgaattatatctcaattaaaaaaaatttaaagaataaggcaggtcccaggatgaagtgatgtggcaagcctcttgaaacaccccttcaaaattttttttagcaacagggtcttgctctgtcacccaggctggagtacagtagtgcaataatagttcattgcagccttgaactcctggcctcaagcaatcctcctgcctcagcctcttgagtagttctagggactataggcacccgccaccacacctgactaattttatttttattgcttgattgattggtagcgatggagtcttgctatgttgcccagactggtctcaaactcctggcctcaagtgctcctctcccgtcaaccttccaagtagctgggattatagacacaagccaccatacccagctacctcttcaaccttgatattttcagggttccctaaatgtgtcaggctagtaactgtttcaaaaaaggacatagatttggtctggccatgacttggtctgtgtgaacctgtgctagctattagtggtcaccttttttcttccaaaccatctgtttggcaatctcttttggagaaatgatatccatatttttccaatttttgaaaattagactgtgtatacctagctacagtctctaacacttttgttgcattattcagagttttccagagaaacagaactgataggatatattgagaggaagagagagagatgtatcatgggaattggctcatgagattatggaggccaagaagtcccacagtctgccatctgctgcaagctagagaaccaggaaagccagtggtgtaatcaacccaagtccgaaggccaagaaacaggagcatgtatgaggttcccagcgtgaccgtaagcataccatgtgttacagcatgggatgtccaagggcaggagaagatggatgtcgccactcaagaagagggagtgaagtcacccctcctctgccttttgttctgtttgggcccttggcggattggatggtgcccatccacactgggagagagatctttactcagtctactgactgaaaatgtcctcatagacacacctagaaataatgtcttaccagctaactgggcaccccctagcccagtcaggttgacatgaaattaacccttatatctgttctccaggattcctcagacatggtcaggggccatttatgacctcatgtaaagatttcttttactccaatcaatatcaatatcgccccattcccgaggcatgaaggtgagcactcagagcacccattgctctccgtggagtcttccaggccctcagcgtctgacagatgcggcaactgcagctgccttttctgggctggtacctgttctcttgcagaaggcaaacttggagtgggagaggtctactttctttttgccacctcttaattctacgctgtctgccccatcagtagcctcatgtgtccctctgacttctcactctcaatacgaaaatatgcttctagaattgtctttaatatttttaagccccattccttgacactgctgtggcttctgtatcccaggctttgatggtcatctgtgactacaggaggccccacattccttttcacatgtgggctcatgggcaaggactctgggggataccaagtgcctctcgacatccctctctttaagtcacagctgctatctggaacttgctgctccttttagcacctcagaacactctaccagtcatagagtcccacatcctacaaaaatgaccaggtcccccagatcttgcccaccgggaactgatgaggaattaacctagtcggagtcctatatctatacatcagctcattcacatgagttgttaagatagctcttttggaagtgcagtccatccttattactcattgattcatatttgcacattcgcctacttgtaaaacttatttgtaacaccgcactcaatactcatggtgtttttgcagtcagtcattgacacacaaacagtgaaaaatttgagttgcctgacctgcaagatcccagtccaggccaaagtaacactctgcctccttgtttcagctctcatagtataagcaagcacccttctcatggttctgtttactgccatgtttttcacatttttgtgcttttccttggtgaatttgctattttaaatggctcctaaacatagtactgaagtgccgtctactgttcttaagcgcaaggaggctgtgatgtgccttccggagaaaatgtgtgtgttagataagcatcactcaggcatgagttatagtgctgttggccgtgagttcaatgttaataaatcaacaatatgtattaaataaggtttctttaaacagaaacacatacaaaacgaggttatgtattgatccagtggtgaaaatgttgtgaccagaggcttgcaggaaccaaaccccgcatttcccctaggagtaatagttcagtattcactaattcagtatttgcagcaactttatggaatgcaactaccataaataatgagaagtgaccgtacttgctctttaaaacagagtagagagatgctgaagataaagaagtatgttgtaggcaacaggatcttaggtctgagtgatttatcttgttcgtgtgtggtggtagcttcgctaggggatgagatggggacgggggggatgcttcttccagtggtcattgtcctgcatggtttgactgagcctatcactgcttcatttgcaccatgctgggatgccactgttgctgaggccctcgcagacagctcagccctgcagtgactgtcattgccatcctgtcatccgagcccagggaccgcgagacagatctatgctcactttgcccacggtttgtctttccatcccagcaaggaaattgccctcattaagtccctgctaaagatagataagaaaatgggacaggcaaacccccacctggcaggcagccctgtcagattctaagcaaaatgagtcagataagaattatttttaggatccttctcctcctccctcacgcccacccccaagcaggctctctcttgaaaagaagagcagctcatttcttcaagccagatgtccaggtccatgcttgattgaaatggagcccctgatacacccagagaaagccccacgctttgtacaaatcatgagggtcccaataatcctttgcacagtgcagctgcctcaggccgcactcctgggcagaacaagctgcagagagtggccctgttgaggctggcccacaactcacccatgagggatataccttcccccgatccccatgctcaggacttcctcccagcatcacacttcatgggaatacaaggctctgggggttctctcccatcgggacccacatccacgcgggggacaaatgggtaagaaaagaggttgcctacagctcattttggcagagccctggaaccccctatgcccaccaggcagtgggcatcccctagttctgtgcccacagttggagagcagagtactactctttctcgatcacaataatccccttttccccagcaattagaattccttcagaccccttaagccctaaatagcaaagggagacccaatgacaagaaaggtgactgaagaggacgtaggggcacatgtctagttacctgcaggacaggagggctgctccctgagaaactggccctggagagataaatgccatttccccaaggtctgcgtctaggatgggacgtagaatggacgccttgggaaccagccacccaagctggtttcattcctcctcagaggtctagtctctactgaaatgctaggcatttgaggattggctcacaaacactaacacccaacccttcattcctctctggagccccaagcaacctggcctctggcaccaagccagcccagccctccccggggacagtgtgtctggtgggcagcccaggcccagggcgaggctcactggcttcaagacgagctcatctctcaccagccaggggatcttgggccctggacaaaccattcttcttatgtccccaaggacaccattgtgcagactacagggatgccattagatgccatgtgatggcagatacgagggaagtcctgaccctgtgtgcggctctgagtctaacctcagagaacgtgcatccccccctctctgtcctgacactcactcctgtgcaggaagaaaagaacactggaccagaagtcatggaatctggattttcatacttgtggtgtggttcagagcaattctcttacactttaagggtacacagtttctcagctataaaatagggctctgatttcagctctacaatgtattagagagagtgcgaggtgaagatgaaaagggacacttctcagggatattccattccttaaccatgggatgggaaagacagttctgaaagacatgttggaggctggccagggctttcagtgcaaataaccagtgtctcgtgtatcttcagctcagcccatgtgccctgtccagaaggttctagaaaggcagccatgcctgctgcccctgtgtatatttttccttccccagatctggcacacagtcatactaggctaagcctcatactcctggccctgtgctttttttttttttttttttttttgtgagacaggatctcactctgttgtccaggctggagttgcagtggcacaattatagctcacgacagcctcgacctgctgggctcaagtgatcctcccacctcagcctcccaagtaactgggaccacaggcacgtgccaccacacttggctaaattttttattttttattttatagagacagggttttgccatgttgcctaagctggtcttgaacccctggcctcaagcaatcctctcacctcagcctcccacagtgctaggattaagggcatgagccacagcacccagcctctctgtcctcttgagatcgtatgctgcccaggaccgcaagattcacaggtgtaagtacccagccatacctgttggtgctcacaggtgtaagcacccggccgtactcatcggcactcacaggtgtaagcacccggccgtacccatcagcgctcacaggtgtaagcacccagccgtacccatcagcgctcacaggtgtaagcacccggccgtacccatcagcgctcacaggtgtaagcacacggctgtgcccatcggcgctcacaggtgtaagcacccggccatacccatcggcgctcataggtgtaagcacttggctgtactcattgatgtagcaggctgtgcatcccactggttctgagggtctttttcgctagactcccaggcaagcctggcccaccctctgccaagcctggatgtcactcagcaattcacaagcacttccagagcactcactgtattcagggcaccctttagctcatatagtcttcccaatgaccttaggaaggagatgctatttttatttccaatttacagatgaggaaagtcactagtccagaaaagtgaagcgacacaagcagcctggcttccaggcgtgtgctgctaacaacccactgctctgggaccccctccttccccatctgcagactcagcttccgtctgctgggcccctccctggctgcctcctacatactccccctgttaaccacctgatcaactcacatgcacggggagctaaagacggcatggtcctctttggggtgagggggctgtcatgtcaaatggactaggggagggctgctgcctcattcaaagggatgaatgaatgaatgaatgaatgaatgatgagatttcagatgagaccctcagacagggtcacccaccctcccaccttctccccacctgcactaggtcagtcctgcccatagattactttccttgtctggatgattcatgaatagacatatttaggaagccctcgaaactgaccagggatttcccagattgtggggaccccactcgatgagcacccagagggaaagttctgtgagttctggagtggtgggcagctcagggggtggggaggcagcccggccagaggagagcttcctccagctgttggctcccctgactcccaagaggacaaacccagagcatgagggtgcctttcactcctcagggctccccaggagagacaggggcacaggttttaaaaataccaaggagctttcctcctgggtcggcatttaccctgaactccaagagttatttctgagtcttcccagtaatttaattatagccatttattccaatgcatgtgttttggggaagccaaggtggcctctattacagtttggaatattttgggaggccttggtttccaaaagtgatgcagggactcaattaggcaagacaccagcaaacagaaataaaatagctcaagaagataggccctcaagttcccagaggcgatgcctgtacttagcacccacgggggaaattaagatgaagttgtcccctgggtgcttggtgtagtcatctctgtagcagcagcatatgccaccttctccatgtctctaagcacctgcagggatttcaatgcccttcaaattatgggctggatggggttgcccattctttccaagtaggcctggacagatgaacagcctgggcaccaggatttaggtcccccttgtaggtggacacagactcaccaacaacttgtgggatggcattatcaaacagcttctaacctttcaaataggcctttggaatcctcaactggttcgcgctccctgaccccctgctccttgtagatggcctgctccacctgccctcagctctgtccccacctaccctcccacccactgtcttcactcgctgtgctctccagaccccagtcttctcgctgttctttgaacaggcctgtctctgtcctgctcccaacactgaccagcccctgtacctcagtccctctcccttgcctcttgttcctgctggcctcctctgattctgcaggttctgctgactccttcctactcctccaccccttactattcatggcctcattcatcctcccttgatcctcttccctgaccttccctacagctgctgggcggggtccagcctgacacagactgagagctttccctgctgtgtgtgagctcctgggctcacctgaagcaggtgcggccactgagggacttagggaagggcagagggccggagagcatccagcacacacattcattcatgtctggagggcaagccccgggatcctgagtcacctcagcaggtggatagaggagcccaaaacagaagctgctgcctggagcccacattatctgcattgacacccgcctgcaggaatacgactgcccttgtgttggctttgaactctgtctttcagcttcaaggggaggatttggtggacaaaagatctaattttaggcttattacttgtcaggactgacattgaactcaagaaaagacatgtgtgaacttgaaacaaagatgagaaatgtttttagaaagagaaaatgtgttctggggtggtgtgcatgtttggtctggtggtctgtgtggccacagcaaacacgtgttccagactggctctgcatgtcagggagcagatggctcggcctggtcaccctgagcaggaagcttgctgcctttgagctgtgagctgcagccacggtgcaaagaggctgggcggaggctggggtgagacacttagagggcaggattctgactgtgccctgatattcaggagggctggcggtgctcagtcaggggtagggtaggaacagtgatcatcagggcctctttaggcagagcacacaaaggccaattccctcccaaggctccaccatcccaattcctgtcccaacgcccctcctaggatggcaggggagcctcggcgccctttccgggagacagccccggtgtattttgactgtgcttccttactctacaagcagtcaaggacagccaccttctgccttcccaccacccccttagggtgagaatgaggaggagctcccaccttcctctactctcatgctgccccttttgaccccagatttactgctcctgcatcccgttttgtgaactggtgtgtcagtggttgatctacccttaatggtaacccagggcatgttactttgcattttcacttgagccttcagtgattacccagagttaagagaatgatttagtttctggcacactgagaagctcccacgtgtgggaggtaggtgagggtgggtatatgtcatgttatttcaaggcagatttttttgctcctaagagcctaaaaccatcccacttgaggcaaacccacattttgcctctgactttgttgcctggaggtcatatcacaggagccacaccagggcccttattccagcctaatgtgtaggtggtcctttgagaatgctgagttgcctagacttcattcgagtcctgtcactagatatgtagcctcaagacatcccttcacctctttgaggcatgttgctcaactataaaatacgatatccaccttgtaagagtgttctgcagttcaaatgaggtgatgctcagaaaggaggtaaaatgccaagggcaacacaaacctgaggacttattgcctatatttgtgtttgaatcacacatgttcggtttatgtttatagttgtggatatgtacgtgtgcatgtgattgctttaggactctgctaatcatcatttccaatgataatttgctggaaatggagcttggcttggacgtttgtattggggttatctattgctgtgtaacaaatttctccaagacgtagagtttaaaacaacaaatatttattatgtcacccagtttccaagggtcaggaatccaggagcagtttaacagggttgtcctagctcaaagtcacccttgagagtgtagtcaaactgtcagccaggggtgtaggcatctgaaggcatgactggggctggagaaagcccaagcagttggagaacagcctccttcacaaggtggttggcagttctcagtttctcattagctgttggtcacaaggtggacctcttcatagggctgttcatgacatagcagctgacttgtcccagagtatgatccaagagagacagacaggaagacaagcagacagacagacaccaagatcgaagctgcagtatgctttgtaacctaatcttggaagtgacatgccatattctaccatattctgttggtcacatagactaaccttggtacagtgtgggaggggactttacagggatataaattccataaagtggggatcactggggacaatcttagaggctgactaccacaacccaccctctcattcccagtgactcacatgcaaaatagtctcacccctcccaatgtctcatttgattatagcatcagctccaagtccaaagtctcatcatctagatcatgttcagatgcagatgacgctctttgggtgtatctccttaagtacagcacctcaggtacagttcactcttgatctgtaggcctgagatttaaggaggcaagttagctgcacacacacacacacacacacacacacacacacacgtagccaacatacaattgtgggacaggcatagggtaacagccttagatacacttattcaagaagaggggaaacaagaagcacatagacattgttggtccatagcagttctgaaatccagccaggcagatattggaagtttcttgattagaactcagttctgttcctgcccaggaattattctacaaggctgtctccgccctctgcattcagggtctttcatgagattgcagcaagtcatgagcccagtgaatactctgggctcttggttctgcctctgagtcatccttccttttctatgaaaggtagcatgtctttgcagctgatttgttgctcagatagcttcctgctggtagaatttgggaggtccaagagcttctttatattttgtactgtgtctctcccttccagtccaagttgttgtgtttccactgaaataatcctttgaaaaactttatgggtcttctgtgatcctattgagtctgttccaccaaataaaagcccacccacacatctcttcaagaccatcccttctctccgctgggcttctgctgagggacaatgcccttaagcttcttagaagctctgttgtttgactgagaagatctttaacatctcttaaaatctttacagagcttttggtctgactgaatagtactctgaggcagcaccgctgaactttctaagatcttgacaaagacttcatagccacaccctccacctcatctttggactatgctttcctgagagtgcctggatttgatctttacgcagaagtcatttcctaattttagcatcatttgccatctggacagtctgggactcttcaaaactagcaagtcctggatttttttttattgtgacagcccttcttttaacttgtctctctcttctcacattttacctagcaagaagaaaccaggcagcccctgcaggaccctggctaaaaacttcttccttagataatgcaagtcattaagtacattttctgcttttcacatatctgtaggagacaatgttgctaaacattttggggctacataataaaaatcctccttcctctaattcccaataatatatttttcacctcccttaaagcccccatcaccagtctcctcaaagtccatatttctaccagtggtctcttcatggcatttgaagttttcactaagaatcaccccagaatgcttctggctccggcccactgcccagtaccaaagccactctcacattgcagagtttcactatggcagcaccctacttccaagtacccaaagctgtattagttatctcttgctgtgtaacaaattactccccaaatttagcagcttaaaataagcacttatgatctcacacagtttatgacggtcaagcatccagaagctatatagctggggagttctggctcagggtctctcgtgagattgtggtcaggctgttggccaggattgcggtcatctgacacttgactcagatgggactggaagagccacttcccagctcacggatgtggttgctggcaggccttggctcctcactggctgttggctggaggcttcatttccttgcaacgtgggcctctctgtagggtgctcatgacagagtgagtggcctgtgaaggagggagggggagagtgagagagagagagagagagagagaaggaaagagagagataagctgttggatcttttgtaacctggtctcaaagcaacataccatcccttctgccatattccattggtcacagactaaccgtgatgtggcaagggactaaacaagagtttgagtgtcaggaggtggggaccactgggagccacctttatctgttttgagttccttcctgtaccattgctttttccccccactttaaatgatctagtgaaactcaccggtagctttgaatgggttgagggtttttgtgtgttctgattcaacttcaaacctctctacaaatgccctcctcatcctgtcctcccctctgcgcttccatccttcctgcccatggcccctctccatggtggggcatcagtgaagacgcttcctgcctggggaagatttgaagccaggggatgctgttgccagaactttggaacacccctcttacccagggggtccagcagatagttctgggaaaaggaaactttccaagatacacacccaccttccccccaccaccactaccacacacacagacacacactcacacatgtaattattttcccttaaactctataatctcaatgattataaaaagtttgggctttaattggaagcatattgaaatccttgcatctgtcagacactgacagagaaggcttccttgcttaggtgggaaaataacccaaatattaacaacacaaataaagatggctcccccagcctttctcacagcagccgccagtggtctgggaggcagtaggatgagagctggcgtccccatgagaagagtgagatcagcgagactcagaaaggtgatgcgatttactccaggccttgcagagctgaggctggtcccagacatccagacgtctggattcttttccacagggttctggaatgttggtcctgtggtggaaaacacgtgctcctttttcacccacttggggatccgtggtgatctggagttgtcttcctgtctggggagggtggtcctgcctcgggtagaggaccagatatggtgggggttcagaatgctgtggagggaagtccctcagaaacggaaatattttggcaggcatgaggaaagattgtgagggagcacccagtggtgggacagtggcgatggacagaagaggactcctgttaatccgctctttccaatccacccagatgcccttccctgcattttgaggcatccctgggaggactgcctcaggaggcttcacctccaggtggagtctcaggtgaagtaatagtagccggctttgtccacagctgtgctgcccagcgcagtcaccacgagctgcctgtggtgatttacacccattacaattaaataaagccacaagttcagttctgcagtcatattggccacattcagggctagccacatgtggtgaagggcctccacagtgtgaggggcccccgaggtgtgaggggctcctgtggtgtgaggagcccccgaagtgtgaggggcctccgcggtgtgaggggcccccgcagtgtgagggcctcctggggtgtgaggggcccctgaggtgtgaggggcttctgcggtgtgaggggcccctgcggtgtgaggggctcctgctgtgtgaggggcccctgcggtgtgaggggctcctgctgtgtgaggggcccctgtggtgtgaggggctcctgctgtgtgaggggcttccacggtgtgtggggcccctgcgctgtgaggggcccctgtggtgtgaggggcttccgcggtgtgaggggcttccgcggtgtgaggggctcctgctgtgtgaggggctcctgcggtgtgaggggcccctgtggtgtgaggggcttctgcggtgtgaggggcttctgcggtgtgaggagcccctgaggtgtgaggggcttccgcggtgtgaggggcttccgtggtgtgaggagcccccgcagcttgaggggcccccacgatgaacgcagtgtgaagggccccctgtggtgtgaggggcctctggcagtgtgaggggcttccgtggtgtgagggacccccgcagcatgaggggcctcccgcagtgtgaggggcttccacagtggaccatgctgctctaggacgttttcatcatggcaaaaatcctgtcagatgaccctgctctggggaaactctcccagcccagagaggcaggcatggggcagttgggggagaagagaaaagtggagaaccatttggaagggtctgggggccagggaaaaggcatgaggatgagaaagaagaagctgagaaagagaaggggtgctcatggagcagtgtgtggcccctttgggtgctcaggaaatggtcattcctctttgatctggggctcagagaggcagacagtgcctaccctgttggggtttaaaacccacaagggaggaccacctcctgcagcaccttctctcaaaagctccaggcccactctgcagaccaccaggacccccaagagctgtgcagcctcaccagcagctgatgggcatcactgggagggggtagagaaggctcattatgatggtcaattcaggacaaatcctttggaatagggagagatgcctggaagcttctggagaatggagaggtccccatttcctaacccaccattggtcctttgtcaccatattccccaccctctatgcctgagtggaactccgttaaccctctcattcctggagaactgcacaaaccacatctcaacaatgtcttcccagtggccacctaactcagcttagggacctagtaagggcttggtttgtctgtgataagtgaaaggtgtgtggatggatgggatttcttcaaagtcttatatggaaattatccatataaaccactgaataaagaagacctctttagtttttagcgggttgggaccagaaacccaatggtcccttaccactgcagtgacttcattcccgcttattataacagcaattattgaagctgctttttatgggacacctcctaggctgtgcattctatctggattaggggtcagcaaagttttctacaaaggaccagagaataaatctttcaggttttgcaggccatagggtctctatcataactcctcagctctgccattgtagcacagaagcagttatagaaatatataaatgaatgaaagtgactgcttgccaataaaactctgtttccataaccagatagcggctccattcggcccacaggccaccattggccaattcttgttgtaggttatcatgaatcttccaacaccccgaagagaatgaagtttccattcctaccttacagccgaggagaccatgctgcagcagtgcattcacctggccgccgggctcacatgccttttgaggcagacctaggcctatccaagcaggactcccattccctggggtacgttttgatgtggaactgcagaaggccttgccagaggctgccacgggagacctcaggattcggggtacccaggagtagccagtgatgcctcaggggtaacagaagaacctggaaggctgtaggaaaaatagaagcctgtttcccctgcttcactgaggttgtaaggcaaccccgagaaggcagaaggggaccagcagggcagtgcacacccaggagacagctcttaccttgatgacggggctgaccagccggacactgccctgcttggaccttttttatgcccaccacagggcaaccactgcctccagcatcccccctggagaagctgctgcaaagccgtccccttctatgggagccacagcttgaagctaaaacaagagcccaaagcatcttcaggtgtaagaagaggtctctttctttcttgttctcggcagcccatccttccccagctccttctggacatgaggtttcttgttaccctcttcaagttcctttggctcgcagcattgcctctcctccagacaatatggcctggccagtgtgacctgctcctgtatgccctccagccctccccagccatgccacggagggacagagctgtccagatcccagccagggtctccaatttgtgcaaggcaggaggaggcacatgtcactgatgtgagagctgtctaagggtttcattcattcgcgttttcaatagaggccgtggtgtgccttgcagatatttgatctacatcaccataatcagacaagattgggcatgttcagggtggtgtggctgtagacaacatcaccatcatcagaaaaagaaggaggaggaggagcgttattttgagaggcatcgggggcctggttgcctggactttcatcattagtgcatgcttatttgggttaaaaattcataatccctgtggtcccttccaaagcgtagctgccctggggaggcagtatcccaaggcactcggacacctctgtcactaactttttcaagtttgtggattatagataagggaggaggcgaggaggggccgagagggaagtgggaaactgtgtgggagggggtgggtgctcagagtggaagtgaagatcaagctgagtcctctaatgatggtgctgggcccctgcctgtctcttctgggagtcactgcctccatgtgcattaaccctgcagatccagccgcagcctgagtgttgaatagggctagctgagctctttgctgaccactgtctccagtggaaaccactgagtgcagggtcaggagtggggtgctctcagacactgatggagccatgcccaagacccagggaacatcctgtggctggggaggagttacagggaaacagattgtcgggcaagggtctctggcccccctccctggcagtcgagggcacaccagtgtctggagacagtgtgggtgctgagctggcacatccaccacagagcaactaggattattgaggagaaggaggaaaattatctgagcccacctagggttttcatttgcagcccgtgatgaagtcagctggccaagaggtcagcttcaggccacgcctgtggggaccctcctggctcttcacactcagctcccaccagcccaccccagagtgcttgctcccaactcaccctcgcagcccttccccctggaaatcataactaagccctcccttcccccagtctctcagggctgtctcagaactaagctttccagccggagaatgctcggagcatttcagcaggggtcttcattctcaaggaggcgggtacaatttggggctcaataaaagggatatttgaaaataaagctgggcatccacccagcaaagccagttggcaatgccatgagggacgctgtgttcttctaactctgctaagcctgccctgtgagccgtggctcaaacccagcatgggaacttcctgtaggggaagaggccaggctgtttggaaaagagacctcgagtccccacccacttcccctgggacaaggagtggggagaccctcggctgcaccttctgtcccccacccccagcattgctgtggtcagagataataccaggttagctacattaaaattatttgggctgggctcagtggctcacgcctgtaatcctagcactttgggatgccgaggcaggtggatcacttgaggccaggagttcaagacaggcttggccaacatggtgaaaccccgtctctactaaaaatacaaaaattagccgggtttggtggcacaggcatgtagtccccgctactcgggaggctgaggcaggagaatcgctagaacgcgggaggcagaggttgcagtgagccaagattgcaccactgcactctagcctgggtgacagagtgagtgagactctgtctcaaaaaataaaataaaattatttgaatcccaggattcattggggttcatttgcatcctgttcatcatcacggcaacattctgggagagaaagggaagacttccaagaggctgaatcactttgcagtgttgacctcacccacctcatgaccccagggtggtgggagcaatgcccttcaccagcccctgtatggataggaagcaggggctggagaggaggttttggtcaggaagggaggctctgtgaatgcttctcgcaagcctagactgagccaggcattagaggagcatcccgtctagttggagtgaggtgattaagatatactgaacaatttacacttaatatcatattgctgtgtgtgtactcctgtgtacatatacatatatggtatatatgcacatgtgtgtttatatgcatttatatgcacacatgtatgcatgcatattgcatgtgtgcaatatgtgtacaagtatgtatatgcatgtgttatgtgcctatgcatatgtgcatgtatgtccagtttgtgtgcgtgtgtgtgtgtgtgtgtgtgatggcacagtgcagcccataaggccctgtaacttcagagaaaggaaaggctttgcagtttagagtagccaagaagccttcctggaggaggtggaacctgatccgtctctgcaatggggccagcagagggcaaggggagagcattcctgataagtgactgagcagagacaaaggcccagaggtaggagcagagaacactgttaggaaagaggccaagccagggaggaaggtgtgagaagccagtgaagaattagagccagtgcgccaactcttcactgcatctgtggctgcatctttggatgtcttgcatgcagatgtacaggcagcaagtccaagagagcgtgttgctggagggacagccggcgcacaggcacgtggcaggaagcacgtggcaggtggaggatgtggaggaagcaagtgcatgcttgagagaaggagactggaagactggaagctaaaaggggaaagagggaaggaggtgaggacagggtgtttgaacagattctgtatctccaagtgtccagtggagccttggattttgtcttgagtcccagagcccagttcctacccatttagttggagtcttgaggattcttgccagtgattaagtttcccccatcaaaataggctatgatggagacttgagattcccttacccaaaggtgcctgggtctggtgagaaggaggaggcgctcccattccatctccagtcctccctgcgagctgcagccatcaatctgggacagagatactaaacactccgtaaatgtttgtggatggcctcttggggagggctgggctggttgtgatcctgtatgtcatgggaagcggaggagttggaaagggcacacccgggtggtctggtggttaggatggccccgttcctgggaatggttgccacgaagcattttccctggcttctccatagaagcgactgttccttcccggagtgttatgaaaacctgcaattaccaagccgcctctgggtgcgagcattcagacctcctcttctttcttccaagatacactgagtcaagacctggtcagtgcagaaagcgggttcctctcccacattccgtcccgcatagccccatggggctgtggttaatgagcttggtgattatgtatttcatgtctgggatgaggaaggtgaagggcttgagtgaatgcctgtgcctctccaagttctggagcaagctgccttctgcactcggcatgctctgggaccactcagcagataccaccatgtctctggggtttggggtccccttcttcctccagctgcactgagtggaagccagagctgtgcatagaagctgggagaggactcaagcaggaatgtgcaatgcagggcttcatggaacgctccacccagactgccgccttgggatgcccagagtttagctctatcctgttcctccgatgattttccttctgggcatatatatttcctggcctcttgcctttgcatgtgtgagtcgtgatgggggttgggggaagaaggaaaaacatatagaatgggtggctccagacttgaaattttcacagtggaagagagaataaaagcaactcttgtgggtcaggaagtttctggacctgccgcgccatggccagtgagcccctaggccccacatggccctcctggggaagctgacattggcccggcctcaggcgggcaaaacataaggagcctcctgtcagggcaggccaggcacgggggcatggcctcttttttcctgggagagcagtcacccctctgtcacctgaccagctgcccagtcacttgctgctgcactcacgttcacacagccgtgaactccctagaactgcatctgctcaaactgctgcttgacccctgctttgcatgctttcttctgcctcctgctcacagtcctgtctccctgattctccacatggctccatgtcacccagcagtcctgtgccccactgctgtgcagagaagccagtgatggcccctgcatgatgagagactcctgtgtctacatccttcctccaaggagaagttggctagttctgtggcttggccgggagtgggtttgggtcagcttctgcacagtgtccattttaaggccaatggtcaacatcttgtccaaggtcctcattttgcagcaagagctgggctccccaaggtgggacccttgccattagtagagcctgactcctaagtctccagctcctgccctggtgctgctcccagcatctcacaagaccccactctgtcacgaagaagcagtgaggtcatgatgttcagaagaggaagaaaccacaaaatagcctattctcttgcaagctgctgcacatggaattctaggggctctttgccccttacccagagtggtaggccttgctggaaagcagaattgaaccaccttggaacaggcaatttttagaaatcaatcagatggatcaattcattaaaaaaggtcattcctaaaaatcaaaagcagaaggaaatacatgaaccttactaatgttaactgaaaaaaaaaagcaaagtaagaaaaagtatatgtagtatgctactgtttctctctgaaaagacagatagaaatatatattcctgcttacttatattaacgataatgaatggatgggtaaacataaaaccagtaaagtggttatttatgggacacaggggagttagtagcactagatatctctgaacaccctgttttgcagatctgaccttacaaccatgttaaatgtttcacataattgtaagtagaagttagattgatacaaaaacaaaccttttgctacgcctgagagggcaggcacctgcatgagctaaggcatccagaccggctccttgggtagcagagggtcccccagccttctcaacatcccacggtggggtgtctaatacacttctcaaagttgcatttccaaaaccaagcttccatctgccccaagcctgccccactccctctgtcttccccatctcagacaacacagcttcatccttcttgcagtcgctgaggccagacaccttgcagacattcttgactccagcccttctctccacccgcagtggaccatcagcagttcctgcgggtcccatcttcaaagcagatccaggatctccacctcttactccctctactcctgcccgctgggccaaggcagtgtgggctctcaccgggattactcctataacattactatctttgatctcacctttttcaatgtcatttcttagctcagaaccctccagtggttcccaatttcatccagataagggccaaagtcctttcaatggtctgcaaggccccagatgatctagctctcaccacctctctgacctcaccatctgccctcccccttcacactctgcactcccgccaccctgccttcctgggtgccagaagttccacctcggggactttgcactggctgttccccctccccggattgctcttctcctgggtatttgcatggcttctccctcccctccctcaagccttggctgctccatgtcaccttctcagggaggcctgtcttaaccattccacctaaaaaggcagtctccaccaggggtgcccccaccatacaccagcattcccagttcttccagcttcccacttccgtaggccttcccacgctctggcattctccatggtgcatttgttctgtttatcttctgcatctccccgctgggtgatgagctgagcctggcatgagtaaatgctcactaaaccactgtcgagtaagtgaatgaatggacaagaaggtagccagccctgctcaaaagcacttactttatcctctcagggcctttcagcacctcgcttagggacctgcccagctccttgggctacctcccatcctgcagttcccctcctgagaccagacataagacaccccaggaagtcttagcctcagagtccagatttgaagcagaaggaaaggtcagctcccactgtccaccctgaatagctggtccccctgtctctaagtcttctcccacctcccagggcctgtgacattgcagagatgtgagtgtcctcatctgggtgggagtcattactcttcatactccccatcaccagtgggacagccaagattcctcccggcataggagccttcaggacagagcagagggagttgtggggcagagttagcacaggccacagtgggttattgagggaaactggggtgtcagaaggacagacctaacccccaagctggatgtcaggcaaatgcactcccgtgtcgtggcccatgacgcctttgtgaaggacggaacccctgcctgatgggccactgcggggaggttttcagttggacttgacggcccttcactcacctggtggggtgtggtgggacgggccacagtacaaaccctgctctggccctggctctgcccttgctcactctctggcctgtggacgaacctctctgcctcttcccagtcacttcatctttgaagagactgtcatcaccgccactcacagggcagcagtggagactgagtgagcctgtgctgagggtgctgcacccatactgggtggttagcatttcaaaatggcggcccggcagattggcccttggcggggcccttcccaggggccactggaagctgagaggcctgtggggcacagctctgtcatacattgtggtttcaaagcccacaaattcctttagtaattcctctgctctggaatcataggagggagttgtgctggtagttggaatatttacccgtcggctcctctccctcccgtcttcctccctttccctggatgtctgcctggccatctgcagtggcccaggtgaccttctgcttatgtgctgtggggtctaccaggctattgcatttaataaactcttaagagcatgtctcctgtgtttgaaggactctacaaatatcaatgcacattgtcagtacaaccaccctttaaggtaggtgctattatgttcacatcttacaggtgagagaagtgaggcagagagcagttctgtaacttgcctggggttatacagcaagtcagaggcaaagccagggcctggatgcaggcaggctgccatagagtccaggctcgggcaattccccttctttctctctctgctcagccccttgggacctctcttggcagcctgtgacccagccgtagccctgcccctgaagcccagttctgaccatccagcttccaaactaagagatggccccctgtagccaggttcctgcccttccccctaccatcgacctccagagtcctccaaaacctggcccaacctaactttccagaacctcttcctgcaaccccaccctcactggccatgcacctggtgtctccatcggctgggcctccgtactctctgaccatgcctgggccttccctgctggactgtcctttctccagaaacctcacccaggctgcaagtcccagatctgctcttagcagaatggtcagggtgagactggtgttcctcagtttactctggcagttttatgcctgaggaccaggagcaagaagtattttatatccatcactcaggatgtcctgggctactcaggccttgcccttgtcctgccttgactgtcacctcttcccccaccacgcaccttgttcttttgtgtccccagggagcagagatgctctggctttggaaggagtggactccagctcctgggacctctgcctacccgtggtcaactcattaaaaccattaaaaaaattcctcatgggttctagaaatattacagtgttttatttgtaatatttatctagccctgcatgccccgaccctgccaagtccagaaatatagcatcgtggttaagagtgtaggctctcctcagcttccagctttctagctgtgtgacctggggcaagttacttcacttctttatgcctgtttcatcagctataaaatgaggacaataatgccactgtctaccccatagaattgtggtgatgattgaataagcacatttgtgttcttagaatagtgccttggacagagaaagcaccatgcacgtcattcattatcatggtggttgttgttattattgttagagaagagaactggggcccagagaggtgtttcctctaagccagtgtcacacagctaacagccacaggttggagtggagccagcagcctgcctctccagccagggtctgctctttactctgcccccgccccccctccttggtacatgttgccaggcagtgggtactccgtgagcttaaaatacccaggtgctaccctaccccaccctgtgtcctgccagctctgccagcactgacctggcccactccatcagccaagtgaccagggcttttttttttttttttttttgaggcggagtcttgttctgtcatccaggcttggagtgcagtgttgcagtctcggctcactgcaacctccgccccccaggttcaagtattcttctgcctcagcctcctgaagagctgggattacaggcatataccaccatgcctggctaatttttttgtatttttagtagggatgagattttgccatgttggccaggctggtctcaaactcctgacctcaggtgatcctcctgccttggcctcccaacctgctgggattacaggtatgaaccaccatgcccggccgaccaaggccatctttaagaggcctggctcagtttcccacccaaaagaagtggacttatggggctgagagcctcccactctgctgtcctctcgtcatcttcatcttcccttgggccacactcagcacaagaagggagcacagggcgcctcccggggaacagagagccagcgagtgccactgggaccaagggcttgacacctgcctccttgtcccccagctcagaaaccacttaccagggctcctgacccacagcaaaaatctaaacattcatttccagtggagctcaataccatctgcagaaagccaggcaggggcagaagaacaggatgtggtccctgcctgcctccagggatgagctgtggacataggccataaacaaggagacatttactctcaacactaggaaaaggtcctgggacagacagggcttttctcatgggccagggtgaccaggaccgtttcccgaaggagacaacacacgagctcctcaagaaccaagagaagatgtgttgaggcaaagatgagtggggtgggagttcctgcaggggaatggcgtgggtgctcataggggaaaagaaaggagcagggcaggttacagcacagtgtgcagggtgccccgggattcttctcaagtcttgaggctccccagagggcaagcagaggaatccaaacccttgtggatgctccccaaaggggctgcagacccgcctctaagaggctgaacctgccacaggaaccgtagcaatgccagaggaggcaccttctgcattcgggcctccttggttcacacgcagacagcgagagcaccatgcccagagtcctgacttatcactgctgccatttcccgagtgagtgatgacagcagcagcgggatcaacttattgagccttgctctgtgtcagagccaaggcgcagctcatttaaccctcagaagccagtgcaatagactttatcatcattatttcacaaatggagaaactgaggcatggacagtaagcaccttgcccaggggcccatgctagaaagtaactgggtccagagtctgtctgggtccagtgtctggctctccctgcttctgccaggggtattggggtgttttttcatctttaaacagtgcagtgtgagtccttgcctatggtcatggggtgagcatcggggcttcacggagatgggagcagcacacccaggacttggcccctccaccagtctatcactcagcagcccagagagccactctggtggttttgcccattacacattttaaattatttttattcttagtcaaatatttaattttttacccataatggacagttggttaaaggcaggaagcattaaagaacactgatattaaaaggctggttcatgaggaacacgtaagtggtaataattctgcacatatgcctcagggtgctctggccggatctgcaagcctcattcatctggtcagagttctcgtgtggcagctcctgcagcttgcagagcttcacaaccccgggctggaggcagacagagcccaacacccatctgactctgtgtccacacggagccaaggccctcctcactcacgtcgtgcaatttggacagaagcacttcctaaaaactctcgggtctcagcatttagaaacaaagcaagaatattacaaaatcaaaccagttgactttcatttttttagaaaaacataaaattcaagaattccaaacagcgggccatgaaatcagtttttgctttttgtttctttttatgccttatatagtcaaactttagcctgcagtttagtgtgtactgatgccaaagccacagtgtaatggtaatatgtcattttgaaatttctttgtagaaaatcatgcttttgcttttacaactcgtttacaataaatgaagaagaatgcatcacttgataattggcagaaggctaaattttgcctgtattcataaatgttattaaagatcgggttaaacacaaaccttgtaattcacttccaataacatatcaatctaaaaactgtatttgacataaaataacttctttatctggtagtaccaaaaataacaattttttttttaacacttaagagtgtttccaagagaaaatattatggtgagaggaattctcaaatcccaaagagtcaagcaagattcagctgtggcagccctctaaactgccccagttttcatgaaggtaaaaataagaataatgagaattcatccttttccctcccgttgaggggctaagtctcctggtaagtgccttataggcccacccctgagaggaggggcgtactttgagaaatttgaccacaagtgctttccagaaggtcaaactgacttgcttatggtgagtgctggtacacaggccctcccaagttccccaagatgtgggagggtttggccacccttcagactgtgcccagacactcaagttccattagggattctattggttccaagtacacagatgcacaatgagctctgtgttcaaccctggtagcgccatcctacggtgaggggtctctgcagtttcacctcctgctaggtgcagcaggacccccttgtgtcaattttattgtatttcatttggtttgcctggtgcgtaagaaattgacttaagaaaaattgccaccaagcctttgttgagattggcatttcttctcgaatggcctcttccctcctcccttttaactaaatcctgcttatttttaaaaacttttgattctgacaaaatttcagactctcagaaaagttgcaggaatagtacaaagaattcttatatatccatcacccagtttcctgtgatgttaacattttatccttctctctctcgtatacatttttttctgacccgtctgaaagtaagttgccaaaatgatgcccttttactgctaaatatttcacagtgtgtttctttaaaacaaagactttttttcataaccacaatacaattctcaaaatcaggaaactgatatagatacgatactgtaattgagtctgtagaccttattcatatttctccagcgatcgatcctagactgtgggctgcattcgattgtcatgacttgttagtatcttttatcctggggcagttctttcttcttctttttttttttttcttttgaggtggagtctcacgctgttgcccaggctggagtgcagtggcgcaatcttggctcactgcaagctccgcctcccggattcatgccattctcctgcctcagccttcccagcagctgggactataggtgcacaccaccacacccggctaattttttgtatttttagtagagacagggtttcaccgtgttagctaggatggtctcgatctcctgaccatgtgatccgcctgcctcggcctcccaaagtgctgggattacaggcatgagccactgtgcccagccaacctggggcagttcttaagtctctgtatttcatgacattggcctttttttaaagagtgaccagttatttttgtagaaggtccctcagcgtcggtttctctggcatttcttcatgattggacttgggttataggcactgtagtgatgtgaccttcccagtgcaccatgtcaggaggtacgtgctgttctttaatcccctgcctggtgatgttaactatgattacctggcaaaggtggtgactgccaagtttctccactgtaaagttacaagttttccctttgtaattaagaaatatctttggggagatatttagaggctacgccaatgttctgtttttcttcaaaactttcatccactgacttccattgatgattcttgcttgaaacaattgttcttatggtggttgccaaatgattttctaattccatcattccttctaaatgtactagttgtcttttatcataagggaaagcctttcattgacttttaactcactgctctaagcctcaggacctcagcatttgggaactaggagagcaggtccttgtcccagaatacacgggctgtctcctagctgagtggtgtttaatgtgaaggttatcagcgtcctgctacaagtcccttgtattttggaaggttctagacaaagaaactatctgctggggagccatgtcccaagatggctgggctgggggttccactatgcatgaagccttgaggagtcctctctgtgataacgtctcaccatggccccatcagttccaccagccctggctcaaaaacgtggcccaggggaggccctactccagctaactccgtttcacatttcctctccttcccaggatggaaaaacagcccttcagggacaagcgaacctgtcagtaattaagtcatgagtggaggaggcagtcccagaagggtggctgggctgtgaggcctaatggagtgaggcggctggcggcgttctccgccaagagcctggaggctccacagcccaggaagcccaaccggctcctctgtgtcccatctgtggggccatctttgcttcacgtaggggcctttccccaagaagggctggacaaggtttatcatcatcctgtggtcagcacttttagcttgggctgttacctgttttccagcccccaggcacacccatgacacctgcctgctctcagaggtgccccaggctccacactttccctcttgaaaagtgtctctcttgtgctgccctcctctgagatgcttatgtttgggacaccagggtcacagcttgctggcctgatgaagtactccgtgcatactgattgaagtgagaacgtgtggggagggtcttgatggatggggaagatcaggcgcagggacaagcagatgcggcactatgatggtggcaccacctctctagctcttgcctggtagacaggaggtccaggctggccaggaggagtcaggaattaggtgagagggagcattgtcaccaaaggtttcaggtcagagcgtggcaagatgatagtcacggccacatagcaggatggaggggagaggcctcagtgtggcatggtctcttcatccagaaacagagactttgaaggtctgggtcaaaaatgccaagtccagccccctggcccctgacccaggagggagctgagttcccctgcagtcttagggggatcctcccatccccactacttctctgtctccatcccacctgcaaccactgctggtgtctctactcttctcctttttaagggtattcctctcagttatgtgggtccttccactacctcacgtcctccaggaagccctccctaacctcaccccgagaactcaccagaccccatgtctcgccacatgctgtcgtagatggttctttgagtagacatagcaattttgccgctagattttaagatccccaagggcgggaaccatatgttatgttgctttgtggctacctgagccccgacacgtaacaaatacaccagagtttgatcagattttaggattgcaaaggaagactccaaagctggtatgtggctctacccagatctcaggggagaggccagcctgagaagcaatattcttcattcgttagctcaaacgtggttttcaatgaatcaagaataaactatgatggatgaggaagccaccatcggccagcttgccaactggtgctgagcctccagcgccccatcttctgccccagcaagctccccagtaggttcctggctaagaaacttgggaaaccccagtaggcaggcttgcatggagggcctgtagccagaagtagagaggtacgctgggcaggggaagggcctgcactggagccaacagggtggcggcccacatgcagctcaggccactgaggcatgttcattgtcctagggaagctcccgacaacttggagtcctggggtcactactcagtttcatgcccaggccttgaagtgaaacacttcattcagaaagtttaggagaagagaaattggcttgttcaagaggattttgctaccaggggctgcggctcacgcttgtaatcccagcgctctgagaggccaaggtagaaggattgcttcagcccaggagttcaagaccagcatgggcaacatagcaaaactcctgtctctacaaaaatttaaaaaaaaaaaaaaaattagccagtcatgatgtcacgagcctgtagtcctcgctacttgggacgctgaggtgggaggatcacctgagccctggaggtcaaggttgcatgaactgtgatcatgccactgcactccagcctgggtaacagagcaaaaaccaaaaccctgactctaagaaataataataattattattattattatttaacaaaaaaaaggaggtttttgtcatcagctgcaagtcacccccattgacggccaaagtaatggagaaagcagccctttccaccagtcccaagatggactttgacgaattaaaatgcccaatcctttgcattttctcagctattcctactagattattttaaatagcagtgaggaagttcttctagaagagcgcagatgggtcagtctcttggagtgaagagcataggggcgagacgggggttcgggccctggtcctggatgggctttctgctcaacctctcccaagggggaaaggctcccctagggttgctgtgaggatcaagggtgagcatgtgtgcccccagcaggtgggggccactcagtgtttgttaaatctgagtaccatggtgacttgggatgaagggagggagggaaggagggagggataatgatggtgctaaattgagtatcactatacctttactccaccttcactccagccctgagagtggaaggaaagccagaagcctagaggtgtgggacagcatgggataatggaggcaggcccattccctgggaaggcacctcccgaagatcagcgcaccccatcctcacagctaccatgtgcatagctgttgtgaggtccgtttgattgataagataacagaggggcagagaagttaagtgacttgtccaagaccacccagctagaccaaggcaaaaccagcatatgaacccaagggtgtccagctttcaagtttttaccacatcaggctttctctccagatgagaacttcttagagggctgctgaggtccaggagggcttcctggatgaggtgctggttgcagaatgggcaacagctaactagtgaggtatagggcactgcagtttctaactgttggtcagtgatcagacacctcccatgacaggaagctcaccatgtccccagacagacccctctgttgcggggcagccctccccatgagaaagttccttcattaagtgagcccaggctgcatctctgcatctctgagccttccctccactggccccttctccccagccctcttttattagacaggctccatgattggtcgcacctgggattttaaataacttttaggcgactttctgtccatgtgccttcctcttggtcctagcttttctagtttaagggctgttccaccacaccaaggtggtaagattaaaacaggcaaggaaagagtgacttccgggagagcaacttccaggtcaatcaactcgtagggtgagtgagacagcagagggccagctaaggcccatcagccagggtgccgaggccagctgtggtggattcgaatggccaggctttgggctggggataaaggaagtcactgaaggtggaccccaagctgcgaggaccccatcacagtatttccctcgggatgatggtagtgaatgttgggtgatgaagactttcatggtgggaaactatgcccaaagctcagcccttagagcccaaaatcagaacagaagccaggcatcctgaggtctcttccttgacctaacatttgaaacagcccctgtcttcccatctgtactatgggtgcacagtgtgatccctccctctgcatagctggaggattcatgctctgttgcttggaaaacccatggcataataatattacaaacaaacactaatatagcacttgtatcaagtcctttaaaactcacaagaaccctatgagatgggtgttctatttgttcccattttataggggaagaagctaaggcacagagcagttaaggaacttgcccaaagttgcacagctaaaagtgtagcgtcaggatttgaactctggggatctggctccaaagtccacacttcaaactaccacgaactactgtgaagctcgggggatgcccagagccaccagcaggctgtagtgagggtccatgggccggatctgggagactgcagggcttggcaggccgagcggaagggcgagggccttcccctggaaacactccaccaggttcacgcggagcctggcgactccccagggcagccgcgtgctcttcccatgacatcacactgcctcagaacttttgaggctgaggattcttggaatgctggattcaccctggaacaaaaataatacctcgtattcataacgtgcttttgttccccacaggctttcctgggcttcatttcattgtagcctcagactagccttgtgatccaggcaggagtcctgtaggtgggaggccaccctaagaacctgagtcggggttggtctccccattctgcaggtgggcatactgagccacggggagttgagtggttggccaaagctgcacagcaaactggttctgggcaatgtgggccaagagccctggatttccagtggggttgaggggaggcctcagaaatgggtccgcagttgagtgaagctcagaaccccatagagtatccccaagaaagcctttttcccttggccttctgtgctgccgcaagatggaggaaggtggcaggagtctgcacgctttcctcccttccccacgaggcagcaatgaagccagaggggccacccgaaaaacaatccccgagccctgccccacaggccccagccacaggaaccagcagactgtggtgggaaagggctgttcccagcacagatggaaaccaagggctgcagtggcttctgtggttttcccgagacgcagtggagccaaggctggctggccggatctccaaccctcccatccagagccctcccaggctctcccctcaccagccccggcctccccattcccagcgggccctggctcagccctccgcctttgcttctgcaccacacgctgccataggacagcccacagctccctccttgctgactttggctgaggcctgtggtcctctgaatttgggtttagtggctcagcaatggtgtgcaagctgccctacactctcagaacactcagtgtggtggctgagggcacacattcggggccaaactatataagttcaaacccaggctctgcttggtgcaagttgtgtgtccttgggcaagtttcttaccctttctgtgccttgaagacctctctggaaaatggagtgaacaatagttcctctcttggggttgaacgaaagccatgcctggcttactgtaactgcttcctacatgctagctatgaaccattcttctgcatccctgtgatgtgagtttgagtcctgtggcctcaggaccaccctcagagtgtgtgaactgcccgagtccagggcctgcgtttggtttatgctccaatatggctgtcttgactttctcaatagcttttgaaccaggggcccacattttcatcttgcactgggttccgctcattatgtggccagtcctgcctccaggccagagtagaacataggcctgtgctgctctctgcttcctttccttcgtgattcttgtcctgggataaagctagagacctgtttctgtaactaatagattcacatctgtctctccaaatggaccctcagcttcatgaaggcagcagccctgtgcgctggagtcatcgctacctcccctccccagaccacaaggaagatagagagaaggttctgcctcatctgaaggaagtggatgctttgggagcagttcagaggcacacacaagacactctggtggcagagacgtgggtgtgatgtagggcattccagactgtaatcatatcaggagtctggagggctcgggcaggaccctgggagctggggaaggctcctgctcaggtctggaccttaagacctggataggattaggggagtgctgaaggactctgtagggacagctgaacagctttgtcacacaaacaccctgcctccaccccaacttctctcagagggctgcaggagctatgtggcctcaggcaaacccactgacatctctgattaacctctgggcagaacagagtctcagcatgtgtttaattaatgaaacaataatgaaccagcctttctctgcatcatttattattcattcattcattcattcattcattcattcattcattctacagttagtgagaaaagtctttgcctgtagggtgcagaggtaccaatcagacctttcatctattccagagcatcgtttggcgaggtaaacatctgatttctaaagcttttagtccatgcagtgagctaccacacttcttacatgaacttttgcctaggctggcaaagacctcaatcttgaattgttttctacccaactctgagcaaagagagccacaaaatctattggagtgggggagtctgcagcttggctggccgcccacggtggcaggagtgtttctgatgcatgctggccctctcctctcagcgttgttaggagggagtgctcaggaagtagctggcccagtgctgctgttgccgccatcatgataatgatggctctggcaattacagggcccgtgtgttgcctaagctttgtagcgatgcccccagttctccaaagagcactgagatctccaataagtaattgttaaatccagtcatatggcgtgttacagcaaaaacacaaatctgagttccagtgagggctttgccactaactagcggggcgaccctagaaggacaaagcaacctctctggaccttggttttctcatccgtcatgctgtgactcatgtaatccttacaactgcccctcaggtggggactggcacatctggaaacagagacacagagaggtgagatcacccagcccatgcaactgtgagtggcacagtgccaggctctgtgcaggctgccataccccagacagacctggcaaggagtgtcctgcgggggacacccatcatccgaatcagccctgcgcgcaccatgggtgctccgttagtataggtcactgtgatccttgtctctgagtgttcatcagccaataccatgatgtcccttggttgactccctcatgagggaagaaaacctcccctcccttatacttttcctttttaagcttccccatcattctgcaaactggggtgggtgtgtgtggcgacttttgttcctgggtcctatatgccatcgctcgactaagcagcccctgagctgcagagaaattgctggtgcctgtgcctccgagcctcaccgcaacccttgcgttgtcccaggtgactgggccagggcaggcagagctcactcagggcatgtgtaggtgggcaggagtggaggtgcctacgctggtaataagcagtcatcacttttcctgaaggcaagaaatatgagcccatgcatagttttaaaaccacttgccctaggaattttgctttcagaaatttttaagcagacctacaaattatgtggtaaaatgtccgacatggagagaaccataataagtcagtggcactcagaatatctagttgggaacgattatgaaataaaaaacgaacagagggacatttgtctccatttggactgctgttaaaaccatttttttaaacaaaatttgaagttattctccctacacccacctcccaaaatgcagctgtggtgttccgagaacatttttgtctttttgtataaaagagagcagtcttagagtaaaacaagacatctgatttcagaacccaaagaataaagaataaactaaatgaacgatggaaaaagcataaaccgacaatttccattctccaaaaaaaaaaagcattattttcctaacagcaggtgttgccagtagcacaaatggaatattaatcttatctcctgtgctgttcttcctcacccgaagaagacttccccagaaataaagaggcagagagttgggtttttgcccttcttacttgcagggctgcaaaactgggtgtccagtatgtttcccaacccaggacccacatgtccatgtgtctgagaccaagtgcagcctccttgccgggttgctgggagcaaaagcggctcatccctggcccagccaaaccccaaacccgcaggtttcgtggggagcagccagctggcccctgaatgaaggtatcgacgaaacccagcgccagcaaatacagaagagagaggagctggttttggctggcccagccaacgaccgctgacaaatatttgtgaatggccagagcagggaagcctaggtctccattgctggggaacgaggcctaactccaagtctgttccagtgcccttagcagccctcttggctccttctcaggcaaagaatttggacctcatgcagttatcaccaccgaggtctcagtggccattcagccctttgtctccattactacaggtcactgcggtccttgtccctgagtgttcatcagccaaggaggctgtgtctaaaggcgaatgggagacagatgggaggtggctgcaaggtgctgtgattagttgacaggcttagctcactcctggagcccctggcaggccctctgctgtaggagtgcacctcacggagcctcggttgtcttatctgtcgaatggaaagaaaggttcttggcctgcctgcacacagaggccagtcccagcaatcactcaccctgagaactaagcaaggccttgtgcaggaagaaggaaaagggaggacagagggacagtcttagtgcctcttcctccagtggcatctgggttcttccctgccctcccagggctcacccagctgattccatctgccatttagctccatatcaagacctccttattttgaacctgttagtctttcctacccaattaggagggaacacttgaggtggactccctggcttccctcccacctacggatggctttccacatgtgcaaaggagccgccgcccagcaagggtgagcctgagaacgcccactaatgccaagtggcctggggcattcttggccattgctatattgtcagggctggctggctccaagctctttcgaaccaggaagacatggaattccaggtccctccagatttccaggaatgaacagcagaagccctgcaggagccagctgatttctttctggagcccctgaccactagccatatagcaattacttccttccccctccaggtagatagaagttgttttcttttctgggggtggaggagtgcactgggtagagagagggaaatccctgtatggcaagtgggaaaccaggcagtttcaagacggatgttgggaagggcttggtcaaccatcctttggggacatttcttgggccatagctgcaggcgccacaaaaattctaaataaggatgacgaaagttgtgagaatcaattattatctgccagggaatttccaaggttcctctctgggcttaaaaataactcacattgaaagaacaaagagaatggaaggagcaattagttgaaagtaactgagaagttaaaggagggagaattcacaaaaagtcacaggcacgaggcaccctggagagtggtctgtgggccacagtttcttctgggctttccaatgggggttgccttacactctgcagaatgagggctgcagccctccccgctgactcaggcatttggggctgggctgggctgggtagtcggaaggccagttggtggtagaatcactgggaggaacctgactcaagggccccacttttctcatggggcccaactcttctccaggtgctggtgctgatagctcctacctgccatggggagtgaaactgaatatttcagcaatgccagtgaggaggggggtgtgtttgggaatggaggggctgcctctcccacccaagtgtcaaggcaacagtgcttttgcccaggaatgtatatcagaaaccaacaagattgaacttggacaccaaggatgaaaaatgccacacaggcctcctgagaagggcccagggtatgcctagtcagcaggattcagttcagggtaccagatttttacagatattttaataatgactcttaaattattgaaataaatatagacaaccccaaaccttggacactgtatataaaaagaaacctaagaagactctgaaaggtagaaagaagacagacaggccagggaccttgggaactgaagaatgacacactggtgagttcctggggttttcctcttggctcagatatcccagacttggagctaaagaaactggagacccagaaacaccatgaggcctgagcagacaaacggagccccaacaaaagtccactctttctagccagaggaccagggaaggggcagcctagcaagacagaaaactcgagacagtagctactttcctccagccaaacacctctgcaggaactgtagccacacccccacccaccactccagcggaggcccaatgaggggcctagacagtgacaaggtacccagcaccccaacagggtggtgtcaaagggactgtcatccccattggggataatgagctactaagcttttcaatggaggcttttcagtgaaaaaaaaaattttattcattttagtggaaaaaaataatgcatttaaccccaacccaggataccctcaatttttcacagataaaaatgtatcaagtaaatattaaaattgaatttatataagtaataagcaataagttgtaagtaaataaatacaatttgttcataacatgcaatgcaatgaaggtctgtggtacccaagataggtcacggaggaggtgcagcgcttattctttagaagctaacattatctttctgcaaaatctttccactattttacaacctttgcagaattcatgcttatcttgtgctccaactgcacttccagtaaagttgtggcatggaaaacaccctgagggtaaaatggagtttgaacatagtagtgctttcagtggcaggaagcagcctttgagccagccagaagggtcatgagaatgtccctcaccaccccttcacttgccttttggccacaactcaaaagtttggggtttgttcctgctgcacaactcacacctgttccctgtgcttagaaagtgttgtcagatgagcctgtcttgacctacacccatcatgttaaatattccttctgtatctgtttgctaggttgctgtaacagagtaccactgactgggctgcataaacaagaggcattttattttctgacacttctggaggctggaagtccaagatgaaggtgtcggtggggttggtttcttctgaggcctgtctccttggtttgcagatggtcaccttcttgctgtgtctccatgtggtctttcttctgggcatgcagcctccctggtgtctctgtgtgtcaaaggttcctcttgttataaggccattagtcagttcagattagggcccatcctaacagcctcgtttaatttaatcacctctttaaaggtgatccatcatgtcttatctccaaatacagtcacattctgaagtattgggggttaaggcttcaacatatgaagttttgcggggtggatgggggacacaatttagcccatgaaaacttgttatagcatatgtagtttgtgggtttgggggtgaaaatgacaatgttccaaaaaaaaaaaagttgtttgaaagggatataacttttcaaaaaacattatggtgaacagtcattcataggaaggtgcttgtaagaagcaggtctgcgtatgcatctttgctggtacatgcatagaatatgtctggaagattcacacacgtggaacggctgcttccaaaggccatatgtgatgacagagtcagaggcaggagggttcactgttatctgctactggatctttttaattttgttccacatgcttgcattcacacatattctagtaagcgaataaagtactgattttaaggaaagaattggctttggtcctctgcagtagcaaggaccggtctgcctgttctcggctgtatccccaggggctgtcacagactctggcacgtagaaggtgctcaggaagtgtttgttggaagaatgaatatatggacaaggcaatgacttcctgttctggcggctgggcacagggactctgaccagcccgcccagtgatcgccttctctgtctttcctcttccgtttgcaggcggcagcagagacctccggggggcaacaagccccaacagcatggtgaccaccagccaggcagtgccaaacacaacagggaccaccagaaatcctaccaggggggctcagcaccccacccctcagggaggcccactcaccatggctacagccagaaccggcgctggcaccatggcaacatgaagcacccaccaggcgacaagggggaggcaggcgcacaccgcaatgccaaagagaccatgaccatcgagaacccaaaactggaggacactgcaggggacaccgggcacagcagccttgaggccccccgcagccctgacaccctggccccggtggcttctgagcggctgcccccacagcagtcaggggggccagaggttgagacaaaacgtaaagacagtattcttcccgagcgcatcggggagcggcccaaaattaccctgctccagtcttccaaagacagactgcggcgaaggctaaaggaaaaggtaccggtaattgaatttttgttcttctcttgcaccagggaggacagcaagaggtaggcactttggtaggtgggcacagtgcagagccttgtgggtttgagggtctagggagccatgtacagggaagcaggggcttcggtcactgtggggaccaaccacactggtccaccactgccagcaggtagggccatcatgaacccctccagcacacttgggcttttcaccttccaaactccaagaggcccagggtgggcacttggaaccagcccccagcccaagggagtagggggaagagatgcatgcctgggagtgatgggggaggtgcagggagcatattctagggttagatattgtttgtgctgaagagcacttggggaaacatggagcttatgaaataagaactgaagcttttctacaggtgagtaccatccaggcagtggtctctgccagaatggggagcagaggtgagttgttcagagtgggggcaggctgattccagccttcctgtttcccgccttcatcacccagaggccagggagtgctctacagtgcacaccgtaaggtggctccattctcagcatcacgcaggtgcctacctgtgccagcatgaacccgagagtgaggcctccttacttttgctcccaggaggctctttctgcaccctggtcctggcctggcctgtagcttcaggagatgaccctaaacctccagaagagggatggggatttgtacttgcagcagtaagtccattgtgctcaccccagtgccaccacccccgaccccactgcccagcaggggcacaggaaaggtcaccctggagaggaactgtcccaagaaaggccaacttgcccacagccattcccacacagcagcagggcctacagaggcttcctcctggggcttccgcagagctccatgttctgggcttctcctccatcctcccctactgccgactctcctcaagctcttgccccagaggccaggcccagggtccacactcaggcaggataaggcaggtcagacctcttcttggatccactcttgaagatgagatgctgctcccagtatcctctccaccgagtcctctagagttctgctaaatgtaactgcagggcagcagagtggaaacagcacgggctttagagcgcagctgagcaggctcagacctcactttgcctttgactggatgggtggtcttgggcaagtcacctaatctccctgagccccagttactcatctgtaaaatgggtgttaatactacacaccttgctgagagactgtgaaggttaaatgaaataacgtgtacagatatgttcttgtgggtattcctattctatatgcagaccactgttcctgccctggggcccagatggtcggaagagaggggtacatgggggaatggaacagagaaggtagatctatagcacctatagatcagtttcaaggactccactcaggtgaggcctcctgaactcctggaccaagaagacatgggctcaggctcaggctgggtcactccccactctgctagttgctcactctaaaaaagggtaaatcctaggtggccaaccagccacatcctaaacattttcatcagggagagcaacactttccttctctctttcaagagacaggtaaagcgtgagatgtctcttggggtggggatttgtgtcctgttaactttacccagggactcagagtagccttccctgaagaggtggttgggtttgaggagaagaactaggccaccctattccttcacccaggattcagccctttcttttttttttttttttttttgagatggagtctcgctctgtcacccaggctggagtgcagtggcccaatctcggctcactgcaagctccgcctcccgggttcatgccattctcctgcctcagcctcctgagtgtttggttctcaagccagagactagctgcccttggaacttgatcccaccatggaagggctcaaggaaagctatagattttctcgtctaacctcactgtgttacctatgaggaaactgaggcccagagagtgaaatcacttacccaaagccacacagctagaggcagagagtgggatctagagccttggtctgtgccttctaggccagagcttctattgtcagggacagaagaccaagcttggatctcatttcatgaccctgaccctgcccttccagccagatctcacttccttgcagttaagttgttcccattcttggccaccaagaatgagtcaatacaataagatgacatttttttcttcttcaagcccctggtctggtcctagttgcagtgaaatctcataaggctgtagggctttttacttgtaatatccctcctagaagcccaactgttttagtggcacatgggaggattccttggtgtgtggcatatgtctacagaagaccagcacagtctccacaggacaaaaagccagggctgtgcccacagggggccctatgcccagagaacaagtcatcattgggcatttggagctgagggtgtaggggacaaggtggccactgcctgggccgcttttaaccaccactgcaggcattttggatctgacctgccttcctgaccaagtcttcctaccctcattttctctttggcccgatttcatatttgttatcttatttcctctttcataatttccattaaatcttttctagattaagatatttgatggacaaataaacaaaaaaagccaatgtatatgagaatcctgggtaggagctagaacccaaaaacagtatcagccctggatgtcataggggccaagaaaaaaggcaacaaggagcttttggcgcatgaggggtctttggtggaggttcccagagggaccagccctcagatccagggaagtaggcctggtcctgctttctgggggtggccaccctctttccaccaggccacccctgcacagagacctcggcttcactcaggcacattcatttgtctccgacacccccaggatgaagtggccgtggagacgaccactccccagcagaacaagatggacaagctgatcgagatcctgaacagcatgcggaacaacagcagcgacgtggacaccaagctcaccaccttcatggaggaggcccagaactccaccaactccgaggagatgctgggcgagatcgtgcgcacaatctaccagaaggctgtgtccgaccgcagcttcgccttcaccgctgccaagctctgcgacaagatggcgctctttatggtggaggggaccaagttccggagcctgctcctcaacatgctgcaggtaactggacgccggccaccaccgccccgcgccccctgcccctctgcgttcggtgagttattcctagcgagaaggctgcgagttctggccacagttggacttttcccaagttccgcccttgcccgattaattatagaaaacacaaaggcagttaaggggccaggaatgagcggctggatttgtgtgtgtttatgtgtgggctccctggttacaatggaccaatataattttataggtgctttatgtttaaccagcctttcccactttctattttcataagaggctggctcttggtctcaacctggctatgtgctttgacctctctacatccaagcagacatgaacttgctgtggacttctcttttcctcctccttccacccagggctaggtccttagacctttgcagatatgcagttgatcatcactggtagtgagatgggtttgagtaaagccacacatgagcagaaaagggatagtctgtttaccaacacactatggctcctgggcagagggaagtcacggtgatgcaagactgtcttcatccttgctctttccctcttaatatcccttcacctctgacagtgtaaccccacccctgatcattgcttcctccatgaaggcccacgtccagtggttctatcagcatgagtgtgtcgtgggagtaggcgcgtgcacttggacggagcttagcaatgtttcatctcacaagtacctgcttgcctgtatgggcagtagcagatgagctggtggccccaaaactggtgacgtcagggagagatagcagggtcatgggatggtggccacatcaggtcctgggactgtccttggagactcttggctgggggagagccatgtctcctttcctcctattttgtattttagagactagttaagatacaaagtgagtttctggtccagatgagataaaatggtagtttccaagtaatgaagtagaatggcaggctatagggccatcttaactagggtgaccatacaatagatcatccaaactgcaacacttgtgaaagtcaaagggggttcagttcataattatgcctagacaacaggtgtaaacaagggcatatggccaccctcaccttaaccatgtggttcgcagtctgccgtcttccctaaaagctgggaggaagttgccgctaaggccacctctacatgcagccggcagggctccatccccacccaccctctcctctgcatgtgagttgcactcactgcaacatgagccctccctggccagcctgggctgcttctctcctgctccaggccctgatcaggttcccattcctggatcgcccgcactcccctggtgacgaattcccgcattacctgagggatttgcacatggggcatgttcctcgcgggccggaatgtcctgggagcgtgtggagagtggcgggcagagaagcctgtctgccagagagcacccggcacaggggagtcagggacagcatcagcctatggtctcggctttgggttttgtttttcaaaaaagggccaggatggggcaagagttctagacagtggttgccagctccaagtaacccagccagacccggtggcagacaggcacccagggcatggggcacttggggagggcagctggctgcaggggccatctcagatcgggtatttcttccaacctgccgtggtaagggtggcctcacccacaagtgtccagcggaccatcaatcctggggaacagtcagccacaaagggggccctatggcccctgcactcacctctcaatcaaccacaacgtgcactggtttaggacaggctccagatgtcccagcaggaagggaacctgtttggctccgtttaactcaacaaagtcctctgcattccccagttaagaactacttgtgggattagtgtgctgagagacagtttggcaaacactacagcagggaagaaaacacaaaattgaaagctgggaagcaaggattccagacctgattcgtttgtcatccgttggagcttggcctctatagttccctgggaaagtgcaagcaacagccttcatcagtgtaccctcgattttgcactactggagatgagccggggtctcgggcaggggcacgagggaccccgtgtgagcctttccctttctcatgctcctgaggccttgccactagtaggaaactgtcctgggtccccctgagtcctcacaaacccactcaccccatatagtggctccatagtaggtctgtcatgagtgatgcaggctttgggaccagcccaagagacctagttctgcaggtgccaccttgtctctggagcagagaactggcactccacatcctgctccccaccccccatcagccaggctgaacctcccagtacaccctgcatggacgaactctcccccagaattcacttctctgtcccactctgagcatgcacctccccctgaagcatctcacactcctacttcaggtggtgctggggccccactttccaggaaacactggcccttctcctgtcccagcacctctcatcctgcagccacaatgttcagtcaccctcctagtattcactgagtatttctagtgtgccaggcaccagcctggggactgaggatacagcagtcagtcactgggcacagctttgtccttaaaaggtttgcagtgaaggagttgaacttaaaccaatggccacatgaatccacagtgacaaactggggtgcgtgccgttactgccccccatcttgggctctgggaggtgggaacccctctactttctgcacctctgtatcccaggggctgcatagtgcctggtgctggagggccctcggtcgtcaaggagaaatggatgtctgaaaaggaaggcgctggaagcctcccttctcccgggctaggggcctgcagggacagctgaagtccagggcaagaagggaaccccccacccaaggcagtcatggctcacattctgaggtttcagagcagctcctcctctcctcccccacagtggaggaagccagccatttgcctgggtggagtatctgcgggtcaggtctttagaaatctaaatgtccacataggccaccactcacccctgtttaccacctgcagtcccagctttcatgtgagccgaggagggagccccttgagagtataaccagaggcttgatctgcgttctcagacctcctgggtggctagacaaggccctttcagctgccatgggaaggcgggtggactgtgctggtgcggggctgccctgatcccacaatggccccctgactccaaggcccagaggacacctgaaccacatctggctgagcctcctcaggccctgtgccttctctctgcagccaaggagacagaggtggagtgggcttttctggacagcataattcatggcccctcaccacccaaacccgagaggtgcaagaaaagaaagcgatgggctgggctcagcaaaacctgctttccctcttaacacctccagggatgtcttttttcacctgacttcattttctggcaaactatgtttgcatcccttcctggcaggcagttctagacccggcctgcacagccctgccccctgcttcctccctgaggtttgcactcagctccatccactcaaggcccatctggctctcggtccccaaccagcacctggttgggtttggcagcctccgagatgcccccataggatcaggttcagctaccacttccacacacaagttctgggccccggcttagcaatgcaggctacaaaggggccagggtgtgaagtgcctccttagcacagctcccagcagtggtctttacacttggttctccctggctgacttctcttgctgccagggcttcagtgatgggagccggcagcatggagggagaggggcaaccgcagatgtggtaaacattctgcggcagaggtctgagggctcttgccaagctggggtgcagcccccatggagtgggaagtgcagggtgggagaagggagaaggtttaaggtcctttaacccttcccagccagactcaacactgctatctcaaggaacccagaagcaccattctcatgagccatgacagtgctggagaccttggggtctcagaggaccccgtcaccaatcccacagctccaaaatggtcttcagtttttacatccaagccaattcctttttacctgaaatgtggcccttttattagtagtgtccttgtaagtaaaattctatttattaaacagacatttctttttttttttactttttattttattttattttttaatcattttttcttttttttatatactttaagttttagggtacatgtgcacaacatgcaggttagttacatatgtatacatgtgccatgttggtgtgctgcacccattaactcgtcatttaacattaggtatatctcctaatgctatccctcccccctccccccaccccacaacaaaacagacatttcttaatgtgccaagcatgttgtctttattaggtcaggggttctcaaaccggaatgtgcatatgaatcacgtgggattttgtttaaatgcagattctgatgcaagaggcctgggatgggcttgagattctgcgtttcaaacatgctcctggtagatgctagtgctctagtccagggaccacagtgggaagtcacaaggcattgaatgactgatggtttgtaggtggtggctctgtttcatagatgggcaaactaaggcacagtctgtcatcagtgtgatggtcagagtggaggtctggcctgggaatattgcatttcagatactggctcttctttaggtcagtggttctcagcctcgctatgcatgagaatcatgagaacacagcaggcagggggcctacccctaatcagttgaattagattctccaaggacgcaacctgggcattcgttagccagggtggaacaccactgttgaggagacaccccagagacaccgaactggttcatcgcggccacttatgaatcagctggctctgcctgtcatgccgcgaaccagtcaagaaatacctgccaggtgttgggctctctgctgagccatgggggaaaactccgagtctgagctggcaggagaaccccattacacaggaggcctcagctgctgagaacatgccttccactcccccagcctcaggctcttcttgtcatcaccctgaacctcctccttgatgagatgaaagccacctcttctctcccgctgcctccatttctctctgtcctcagctccttttcccattttccttttccttggcctgggatgtgtgtcggaacagctatcacatgttttaggaaaagggcctcattctcacccacggtgccaggctgtaccagaggctgggccacacttcgcagttcagcctgtctccccatacaccttcccaccaaggttcccaacttctctggctttgcagggtcctgactgcagactagactgactaactagatgatgtgcattgattgtttccgacttccaggagaatgtggggtgcccagggtgcctgggttagagaaggaaccaaaagtttccttggatcctcatcagggaattgtggtgtgatacagggcggtgaaggggctccagtttcacagagaagtgaagaacgagtgtgcctctttttatgggacctttggaatgacaggaatggaagcctgagccctctccacccagcactgccctgtcactgccccgggacgtccacgtgggctctgggaatgctcctttgctgagacaggcttgggtagtacaagttcaagccctcctctgttgaaatgtgtgtgctctgtttagccaagaggtgtctgcatccgagctatgcagagcaaagtattattagagccggcatcagtgtgtctgtaactgaacccagctctccctagcaaccgttgccaacaacacatctaacagaaggatgcgatacctttttttgaaaaaaaaaagtttgtctcaaccaagtcataaacacagcaggcctgttgtgaaaagacaacacaaaatcagaatctggtgtgtgaccagatttcaaaataaattgctcttctctagcaccttctagaagacagcctgttaaaaagctgaccttgagctaaagagcggagaaactcttcagagtttctggctgggtcatcatcaagcattgtgttttgggcttttcatacatagacgctcagttgagtggtgactctgtgggatctctgggaatgactttagcacagaaggggcactcaagattttctggcttggctttccttatcagtgaatctctcaagtgtgagacaagcctgaagatgtatcttacccatacctcatcctggatgtgtgtgttgcccccacttctacccgtttctcccatcctcctgcccttctccttgtcccatgttttcaggcttgggaagaaaactgggccattcctctaactctcttcctaaggggaaaacctcgttctcttgtgattctctcaaggtctctggaaaatcaagtcattcccctttgtcagaagtttgaagttcctaactcttatcttttacataggaagggaggagggagactgatatcgattcctggagtctaagttttaaactcctagatggccagaatcctggctgagttatcggctgtccccagctcctggcttcatggttcatagtagatgctcaggaaatggctgtggaagggaggcatggagccatcagtcatgggtaccaatgctctctggggcatgaggggctttgaaactcttctgagcactttcctgtgtgtgaatcggaggtaggttccagggcagggatccctccccaggcttatacatggggaaagtggctcagtgaggctgcaagattgacccagcatcacgaggctagctggagcttctggatgccatgccacatcctaaatagggtgtaaggctcaaaaacttgggaaaatcaagaatccatatcatggttgggagcaatggctcatgcctgtaatcccagcactttgcaaggccaaggcaggaggattgcttgaggccaggagtttgagaccagcctgggcaacataaaaagaccccatctttgaaaaaaaaaataggcaggtgtggcagcattgctactgaagccccagctactccagaggctgaggcaggaggatccattcaggccaggagtcaaggctgcagagagctaggtccctgctgttgcgctccagtgtgagcgacagagtgagactctaaaaaacaaaaaagaatccatctcaggaagtcatcaattgggatttcaaaatccaccctgtggaataatcccactgtgtttccaggggtcgctgagtctctgagctttctgggcctctggaggtcaagggtacctgaagaaacccctgcactctccattcgccctagtccctgtgaaaccacacaggctgctggccccagttcccatctcctccttgcatcctctccctcttctcagaccccctccctcatttctgcacacccaccgctgagccgatgtgcactccaggcatgtaaactaattttaatgttggcccaagccaggcacacccagggatagaagcacattgttctgtgcattccaaagcttgagcaaaagccctggccatacccacatcgagctcccctccactagttgctagaaatcagaaaggctgaagcaaagggccagaggcagtgcaagccgctttccccgtgggcaggctgcacggaagcttgcaaaagcccagaaaagggctgtttttctaaaaatggctggcatctgagctcccgccctgccccctgtgggccatctgtccccatgctgaagcccgtgccctgcaagggacatgcagagttggcacacacatttccctgaaggtgggcaccaacaggcctcgtcaggctggcctggcatcacaggaggccagcagtcacaggagcttgacccctgcccaggattctgtggcagccctgggctcccccaacaggaagagccaatgcctgactcctatccatgttctttgcccctgcggccagagccacagtggataggagccgtgtgcctcgttgccaatcttgttgtctgcacttgctttgggatgagtaaatatgacctgcttttctccaatctttatttcttctcaacgcttattgagcacctgctatataccatgcactgtggcaggtcctgtatgtctctgttcatttgccctccactgtggtctttcaatctgtttgtgcaaatcttaagcattgcattcaaggacccaggtgggatacctcaatgtcagtgcttagaccagatcgccctgactgttcagtttgggtggggcgggggaacatgtggcttccaggagtgctaagcctgtggttctctctggagctttgaagtgctcagtgagacagagcagccgatgaccggatcataaacaagcattttgatttttgaatctgaaaataagcgaggaaagaaaatgaccactgatcctcagccagtcctggaaagtgcccagaacagcagcatgccaggtgtccagtcatcatatcatcaggggggcctgggtgctgctgctgtgccaactactgccccaggcccccagggaccagtgagcttcctgcaaaaccaagtgcccagcttcctgcctctttgccactgcgccactgtgccactgcgccactgcgccactactgtgttcttcaaaatcacagagagccccgctcctgagaaagcccaaagtgcctttctgtgcacggcatgggcttttacaagtctcatgggcagtctactgcaggccttgtcagagactctagatgtgcagaggctgagggagccttggacaaaagtcactcctttcccgtgaaaagtggccattgccctgtgttgttaggagcgtgggtggctcaggaggggagagcaagaccagcctgcagcttcatgaatcaggtcagctgggccatctggagcagacaggtgtgggtcgtgcccccgaatctcatttctctagacaggatttcttgccctgaggcagcaacgctgaggcctgaggagtagcaaacctgtgcagtagcatcgattgctgcctcgatgctgatcttgagcatttaaaacatgtctctgcacccacgtttccgtcctgcaagggatgattgggttgtggtagagcttaaatgaggtaatgcatgcacggaccccagctctgagccacaccactcggatggctccatcagtgtgggtgccctgccctggtgggatgaactgggaggcccttctaactttatcccatcctagattcccaaagaccaccccatgcctcagtcttgggcagcatttccatttcccccccctacgctgattaaatgtggaacaatgagggcaggcaatgagtgcttttagactattgtcttcctgggcggtgggcccaggattgacaggtgtactcttcctcctagtcaaatctgcctcctccaggaaaccttccctgatctcccagcccagggacctcaccttcctctgactcttgaacatttaccatgtgtccctttcatgaagtcttctgggctcccctgtttaagcttttcttatctgagacttgtatctgtggatgtcttggggcaaagaatgcgtctgggtcatctttgtgtcccaccaccatactggtacccacaaggtattcatcaggcatcagctggctggctccaggagcttccttcactggggaggaaggagcatggataggcaggcatgggaatagcacaggccacagccacaaaagggaatggcctggggttttctccctctcgcttctgggccaggagagctttacccaggtcaggaattatttcaccatcacccgtgtcccttgccagaccgtgtccccttccctgcatgccctcaccccccacccagggttcattttccctgctaaatcccctgatagaacttggccgggcactgccctgtctgaggctgccacgccgaagcaggccctgcagataagtgggttaccggagaaggccagctcgggtgtcccaggccccagagggtcacccctggctggctggcagctcacccccagcacctcctcctcctccttccccggagccaggcaggcaggagacagcagatccttccccccagctctgtgagcggccggcccccagccgccgcggggaatctgagctatgctaagcggctccagatcgcagcatctctgccctgcccgggcacggccggcccagacagggcgcctctacctgccgtggctgccgctggaaagctggcaccgcctgggctgatggaaaaaatctccctgcgggttatgtaactgctcaccgccctgtccctggctccccagggaggctcccagccactaccaagagagagcagtggcccctgggcaggaaggagaccacagagggtcactctttcaaaaggaagaaaatagtgttgcgttatctgaggtcctcctctggaaccagcctgtgcatggcgccaaggtgtttcctgaaaatgcttaaggagctcagaggcctgccccagtattatagcaagaagagagctaaacctagcgggagggagtggccacagaggaggaagagggcaggacagctttgttactgtttttcttttcttttctttttggcaaattattattgcagtaaaatataccataaaattcaccatctgaactagttttaagtgcacagttcagcagtaccccgcatacctacaatgttggacaatgcccatgaccatcccccggcaccccaccaaaccctctcatcaccccaaacaaaagccatgtacccaccataactcccctacagcaataactcccctacagcaataactcccctacagcaataactcccctacagcaataactcccctacagcaataactcccctacagcaataactcccctacagcaatacctcccctccatcttccatctccatgaattcacccactctacaaatagcacacatgggatatcatacaatatttttctttttgtgcctggcttatttcacttcacatcatggtttccaggtttattcatgtgtcagaattcccttctttttcatggctgactaatattccattttatgtctataccacattttgtttatccatttatctgtcaatgggcacttgattttcttccaccttttgactattgtgattcatgctgataggagcatgcatgcacaaatatctgtttgagtccctgcttttgattctttggggtatatacctagaagtggaattgctggatcatatggaaattttatctttagctttttgagtatctgccaaactgtttccaggaagggtgtttttgatgggggaaatatcatgaaccaagagccaaagaaatgacacaactgagggacaataaggacactgccttactgaaattcagctgagagctggaggaagtctataagggggaccgactaagaggcagaaggatctggactttataaagtgggactcagggagccattgtgggttcttgagatgtagagttccaggatcaattaaaaatcatagaccagtgtagacttgcaggaaggatctatagatcatccagtccaaccccctcgtattacagttgagagacttgaggcctggagaggttgaaagaggccatgaagacatgttgataggtcataggatgttggacttaaagatgttttacatcagagaaccaggggttctaggtagccacgtggtctcttgtggagagggagcatatccaggcttaagcctgcccctcaaagacctgagctgtgatggcaggcctcatttccctgccctactctcaggatcctgctctctggcccctggcacatggaactgtggcatttccaccaccacccccaccagccagagccaggagctggggttgcctgccatggggaactgtgctcccctagcgctggtccccttccttcagtaagtgccatggtgggctccaagagcttctgggacaagtcagtgggcatcttcgaaccagagcccctgggtgagcaggcttccccaggggtacatagcctgcattccagagagggcccctaacattggcctgtgggccgctgataggaagaatggatagagactccgcacagggtgccccacccccggccctggtgcccctcaccatgctgctgtgggcttatctccttgttgcccttcgcccataccaacctgcctgagctgcgtttctgatgcctataatgaaccagaagggagttgaggggacagagggggagaggaacaggaagaggagatgacaggacaactctttcaacagccagcaggaatgccacacttggccttcaaccctccgctctaagagtatttatacccacagtgttcagggtggccaggttccaccttgtctagataaagagcaggcccccttacggagacagaggtctccccagctcccctccagacagccaccaagaggtcaggaacacacagagtgcacggcgcagtgcatggaagggaggcgctgttgcaggggcagccatcagtgcctgggttactctgaggccaatcggcatcatgtgagcaatttaaacccatggtgtgcccaaaggccagcttttcctacttctaggtcttccctctctgggcccctctgtccaggagaggcggatacactcgaccagaagcagaaccatgggcacagggagtctgcgtcatgctggctcagcatggctctgcccttgaaacccagagcctagaataaggggtccctgtacaccgccagagtgcctcactgcctcccacctagagctcaggtttaaaggccttcactcggtatcagggtgcagagctctgagtcttcagggaaaaacagcggcctctttgggggggacagggaggaacctgcagggaacgaccctcccttaaccctctgctggcccttccaggacagatcccaggtcccagagtgagagaagcttcaggccactttgaagtatgaggacaggcatgctcaaaatcgtcccccctccagcacccccttgacagtgccgagcctgagaccaagtgtattccagagaagtctgtatgcacccaggtcattcacacctagacccattaagcagagagggcttgggagccagcacgtcaccatgtcatgcccctgcctcccagttttccgtagagcaaaggccatacgaaagaagggggtagcttaggaggtatttggggaaagccagactccagctaaagctggtgaatagctataatcggaataagtgcattcttgagcagctgcgtattggagcgccacatattggacccatacttagcatggaccccattaggcaaccgtcattgcattattctgagtattaaaaaaaaaaatgtggcaaggggagtaatatctctaaagtggggttcgaagcacagtcacctggaatcagccttccctgccatagacccttcctttaatgccttaccacctgtggcataagaaataactcaagcggccaagagccagccacctccccctggctctagttgtggcgccatgcaactggttgactctgggtggatctcaagcgtggcagccctacacttactcttctgttaaatggggtcataatacccatctcctcctcctgcctactgcactgacattatcattgttaaaatccactgaaatgcctgacttttacctgtgttcccttaagactcctcctccaggagaaacttgtgaatttcatagcagcatgtttttccttttccttttgatgattccattcattcaaggttcttaggggaggtcccaggcagggaaagcgccatgagatgcccacgcagagattcttccacaagtccaggggcccccggcacagtaggacttgaggtttgggtgcagcactgtagacagcccaggatccagccacaaggaaagctctccaaggggccctgggactggcctggaggccccacagggttccctgagctcagtactgtgaaaccccagtgaaacaggcactggcctctgcctgacacataaaggggggcagggccagctcagccagagggcagtttaggaacatcagaggaaggggcaagccctgtaagtggagtaggttgaggaaggcttcctggaggaggaagcatgaaggaagaggcaggatctgggtggaaggaagacaacaagaggatctgtaagtggcaggaccctttgagggactgggggttgcagaggaggattggggaaggaggtaccgccagcctggcggagggtgtcaatcagcaagcccagggctgaggctgcccagccgggccgtgaccccaggtcactgtaaccacactggcccgttcattttgctggcgcctgcttcttgccatttcaggccaagaccatattttcatccaaaactaaaacttctacctcaagaggcgtgagtttcctgccagccttgggccgtcttttgcaggtggcagagtgggctgctgaatctgcgaccctggccaggctccagggcctctgaaccctggggttttgctgaggcaggtggtgtggcaccaagggcctggcatctgaggccagaagatacccgccacccctccctggtgaggttactgccttgtaggagagggtagggatgcccacctccatatgcccccatgtgccccaaccagcccctctttgtgcaccagctgcttccagagctatatggagatgggcgcccaccgcccaaccaggcacagaggtgcagtgctcgctgtgggggagggggagcatgatgccacccccaggagctctgcaggagccagagcagggttgtgcaggaggctgccatggggcgggtctgcacagcaacacttgctgctttcacctcactcccctctgcagaagccccttttcctcccctccctcaagtggtggagcaggaggcagaaagtctgaagccagcccctcaactaatgtcaccgtctgagcctcagcatccccataggggaaacgagggcactgggtggggtgtggtctgtgggtcaggtctccccagccaggcaccaggccctctccagcagagcctgtggcacctctgtctgcctcgcacagcccctcaagtgccttgagcctgtgaaggttgcaaggaggtctaggactagggagaggctggaacccactgcgggtgggaagagaagatgggagctgctctgtctgcaatctggcagttgtttatcccaaacagggaaccagaagctgaggatttaaaggctcggcgtgggaggaggtgctctgggctgcaggagatccggtggggagccccagccctgcctttccctggctgggcgacctcaggccaggccttctaccctgatggtggcttcctcacccataaaacatggagaggttagaagtcatttcagacattccttccagctttgttatcccaaagcagatgcgctaggcaaacagagggtgcctgctaaaatgcctgttgctgactgattggttagcgggttgaccagtgcagagcaggacccatccccaactctccccacccggcgggtctggccggctccttcccacccgcctggccccatttacagagtctggggcctgcttggcttgtgtgtgctggcggcagcacctgctgggtgggcagggcggcctgcagggggcaccagtgtgcaaggccagcccttcctgcctgcggccacctcccagcatcttggcatcctgggggctgtcccacagggaagatttaaactatatgatggtgaccgccaccaagccaccctcctatgtgcaattttcagaccccttggggtcccagccctgagtccagaaacctcaggctgagagttggactagaacccacagcaagggtcccctccagacctccaaaacgggccagtgtagtactcattcccattttatacccaagacaaccagggctcttggaggccacaggagggccaccgaggtctcaggtagcttagaaggaggacagagcatgggtcctggattccctgggaacagtgcctgcccagagacccagctgcccttaggaacgaatgagtatcaaccagctgaggctgcattttcttaaaatgcattggtttgtctagtgttgtttatgttctttctcaaacagcaggaagaggttgtgggaagagccctggctgtcaacaggcttctcccatgcagtaggggtggacagagggactgcagccagggtcaagggcaggccatggggcggtgggacagagagcaggccgcagcctcatctggcctcagtagccttgtacagaggcaaaggggcttccgtgtggggtgtcagctccttccacacctgcctggacccggaaacaggcatgccttgagtcaccagcagtgggcagccgtagagtcactgtttcaacaccgccaatttgttggtcccacgcctggggcccctgtggtcattgcagtatgttttatggaacattctgtgaggattcctcttggggttttttagcagccacccgttaggatgttcctaaagtagaaggcaaacagcccacagggcctcagaattctagaaaaaatgtctgtgcacagcatgggagcctgagccaggagggcattctcagccatcttctaaggagccaggtagaaaaatggggtcgattctattgtagttacttccttattttagctattcattcagaaatgttagctgttcaaagggtatgtcatttatcaatcaggaggcgggagccccaggtctgcaggagtgcaggggaggatgtgagcaggtcagtcacaagctaacttagaacaagcattcaatcccccagaaaatgcaccggggaaagccacaggcattcccttttggtagaaaaggtccctggtctatcttcatcgatgggactctcatccggggtttgtaccaggggaacctggccaggggatggccgttcagcctctgggcatgttgggagaaggggtagttcatggtgtgccctgggcaccccatttctgatttctacccctgagccaggaaggcctctcccatcaaccaccgtgggactgtgaagcaggtaacaggcagaggtggtgggggtgtccaggggcctgaggtggcggtgaggatgggcatggagtactacacttcattgaaatgccagcagccaggaggtgagcaccttgggttgggagtgctccctgaaccccagaactggaggcgttctgggggcattctcactagcaccgcatcgggacacatcagtccagcaggtcgcgctggtccctggggagcccagaatgacagtttgtttctttttgttctggctgacaatgatgccacaaagctgtttcagccctgactgagagtacaggatctggacagccccgatttgaatcctaagtttaatacttcgtagctgtgtggcctgggcaagtggttttccctctcggggccccagttttccatttataaactggggtaatagataatacctgcctcctttgggtggatgaggcttgaatggtggggacgatggtgttagtataaacacaacattgactggtgtcgctcatgtctgggggttcctgtcaggggtccaacaggaacaccagttactcctcctttgccattgggccagctctctgcagtcactggctggataccagctgtatgcatacactgtgggccataagtatcccttagacctttgtgggtgggggttaacagccccattttatacatggggaaagaaagttccagagagcttaggaggtatacgtcaagtcacgcagctggtcagtgacagacagaactggagccaagtccctggtaccccacactctgtctcctcagaacacactgccacctgcatgccctgattggtcaggagtgcatctggagggggtcagttataaggctgaggagaggtgacagggaaacgagataagaaacatgccatttaggtggccatgctttcagagcctcctccccacaggccaggccttgggctctccccactgccatcttatgaccaaaagaattgagagacagcttcccggccagcgcttagcagcgggcttgggtctgctgcctcctttcctgtcttgccgggggtgggggagagtctccaccaagctgcagacagacagaagaatggttccttgtcctcccaagggggacaagacttctccatgtccttccttcccactgggctggtttccaacccaccaccttcatgattcgtgaatgcaaagagaagaccacttagatcggtatgttttgcttccacttggcagccctaggtgctggaggctgcagctctgggtgaaggtgggccctggtctgtggggtatgggcatctgtgagcaccatctgcatgcagccccggaggtcaggtggcagagtctcccatgacaggttccagcagcagaagtcctaaggaagcagcttgtgtctcagatgaggctgtgtacctccgttgcctgtctaggctggaggaagggtgatggcacctttaactggtcccttccttacagatcactaagtgtaagaggccaagcctgcaaagaaaaaaagggagagggagagaggaaaaaaaactagagcctgtgcgctatgtcatttctaacactaaatgattaagaagtgaggaccctggggtgtgagccaaggcagcctgggttgctcagtcctctagaaacccttctaagctttcctcagcacacagcccagagtgctacccggagaaagagccaccttgtaaatcgctttcttcactgtgctgctatgcctttcaaaacaaaagctaaaaactcctcccacccccatacaacttgatttatcatgaccccgtcatctcggtgtcccggtgttagttcaaaatcaggctcaaaactgcaaaggctggagggagactgtgggagggtgagggacactttatccagcacgtggcacacgcacctctgccgcgtcggttcatgcgtgtccctccctgcgagcttggcggggcactgtggacactgggttctctgcctgataaagggggatcctttcatgtagcatgcatcaagatgcatgcatggtgtgctgggctgtctcagccactctcccaggcttccctcctgccggtccgcacacaagaggcagcgtgctggggagccagtggaataagggccccacaggggcaagatggccagaggccatttcagcatgaccagcatttatggatctccttctgtgtacctagcagggcagagtgcaggggtagggcttaaggaggggggcgtgctgatagcctcaggaggcccatctgtccctccctctctccctggactcctctgtcatcccatcccctcctagctggcatgatttttcctgtactcagatcgcaaaagactagcaagccaatatgtttgctgggggagtcacagaaggcgaagacccccccatccctgccttcacggagcttctggctttgtgagcccccctcttcttgttgtcaggctcccaaatgaccccaaagggtttgcttgcaaaagtttgtcctctggactttgtgtttttccccatctgctctaccctcctagtgcctcctggctccggccccagcgccagcccctgtctgtccctgcaaacacaagtcagctgtgtgtgcagacaaagccgtgcgccgcagcgggggccgggcctgcagaagggacatttccagggaactctgggggcggcggctgggagggcagaggcgactgtctgattagcagagactcggcgtcacagtctagggcaaagagggtgcgggggatttggccgggccccaggggccagtggctgtgggtggtgaccaggggaggcagccaggctggaagaaatctgctgtttgagaagtggaggaaacgggctggagaggagagataacagcccgttctctgtgtatctgcatgcgtctgccggcgagggtggctggagccgggcggtctgaggccatatctagcgagatttttgttctgggttgtgaaagtgacctatggagccagcagcagggttcagggcctgggagagaagacacgtggccctcccctctcctccccttgtcttgtgttagtctcccctcctctcccccttgtcaaacagtagaaaagggagggggcatgggggcaggagaggaagcattcttagtgcggtaaaaggcctgggtttcggtctggattgtaccactaatttgacatatgaacttggatacttcccctaatatttctggctgtctctgtctcattggctgtaaaatggggattatttataactgctctgcatagcacgcatgaaataaggacgtgaaaatagtttgtaaactgtaaagtgccacgtaaatgttaaagagttgtactgattcaaactgctttgaagcaggggctggggctgctgattaaagacctgccttagatgaactaggtgctgagtggtgggcaggagggtggggtgggtaggatcaagacttagggacccagaagtttccatggaggcaggggtgggtcacgggcccagccaagtgagccctgccagaaccaggacccagggcaggcgtggagggtgaagtccaagagctctctgggtgggggtgtttggtcatgggcttgcagattcaagtagaaggtggcctgggttgggcatggacttctccagggagacaggggaagccatatgaagccccttgcccatcaagctccagggcccctgcctggcctggagcataaagtcccactgattgcagagggatgggggcagcactctgttttcctctcctgagcctctgccacccaaggaagccaggtccccctgtccccccacccgctccccatcctgacctggaaatcagccctctctgatgtggaaactcaggcaggagctggcaggggtgacaagactgtgagcgggagagaagctgagctatttaaagcgtgcagcgcccaggggacatgaatgccacccacccacaaggccttctcagcattcgctttcccctccttggcccagatcccaggccctcagtgcacccacagggccacaggtcaggtgcccgaggctctgggaagctgcaggcggacaggtcctggggctggcatgagatgtggttcagtccaacctcggcttgggttccctcctctgggcctccgggctgagttggcggggccacacagactccttggctcctgtgccttataaacagggctgagtgtgagtgtggagcttagaagaggaatgcccacgcctgtggcccggggcagctgccaccacccacccccactccactggctaccaagccaccagactcagagagcccatggggcaggagtgggaagtggggagcttcgcctgtagacccttctcccctgcccaggcctggcttcccagaacaccccagattacagatgtttttctccttcatctccaattaacatttacctgtcctgggtcctaacctttagtgaatgacagggtgtactgtccctcccttcctatctgggaaaggctgatgtcttagctgggaagagcaactgggatccaggcctgttagacacagggtcccatgtaggccaccacaggtctggaccacctgggaggcctagctggggggctcccaggggccagtccaccaaccacagctggtctacattgcaccagcacggcttatgtatggaatgacttgaaaagtcgtcgactgccctttctgggaaggactggctactactctgagattgcatccttcctaccatattggcattaagttgtcctttcttttatgatatgacggatgaagctttaaaaaaaaaaatgcttagcaaaataaaatgtgggcaaccctcaaattttaccagtccaataaatcttggagctcaggactctggttccagaacagcacggttcacctggatacccagctctcctggcactgaggagcccggggataagaggaactgttgagtgtgtggggtacagcctggggaggcctccgaccctggggctgcatgcctcaccctgacagtaacttgcagcttgaactgccagttcatctttacacctgggatttccaccccaccccacctcctctatcctctcggctggagacacttcctcccacgtggctgggaattcagtgttttgctgtctgccgcaggctgccaccatcccgtaggccgggggaaacctgcggaggctgcctccaggcaagcgctgcctgccgaccaccgccctctgaccccagtccaccgagccccagaggcacccagtcagcactcactccctccagccttacgtagcgtccacacgtatgctgttacccacacgggccaccaaacctccagtcccctgccctatctcacacacatctttacattgctccatgtgcactctagtggggatggccttttccacaccaagattcattcatttatcagctgagcatgtgctgtgttccaggcagcgagatggtggaaaaatggaaaaggaggtcccctctcctgccattgggcatctcctaatctggtggggaatgcagacagtacccagtaactccagaccagcatgctaggtgctgtcatcgcggcacacccagacggccccgagcatcgagaggagagagaactcacatgagggtgtctcacagagagaggaacacaggcctgagtcccagcacctgggctgggggtgccaaacaaagaaacgtgcagaagggcattgtctaggcgaatacaggagcatgagcagaggcaagaagcagacaagaatcatgtacagcaaaagaaggggttgttcccgagtatagtgtgcactgggggctgaggtgggaggagagagtgtgggccagaaccagcttgggaggggcactgtttgccctacctggtcggagggaccataccctttggtctctggggcaccaccaaaggtttgtaaggatggaggtgatgtctcctggttggcatctttggctctctctctgcagcaggatggaggagggcaggataaggaccctgggaggagcaaagcaccccactgggggtgtcctattggagcctcctgggagagccaggagaggtgtgggcagcctcaactctgtggcagtggggcctaagggtcaggggatgatccatgagtggtcagcaaaaagagagagacagagagagaggtggggggactacctgtagagcagttaacatgcatcagcaccacaagcaggaggaccgctgggcagagaaacatgtatgcacattcatgcacgtgtacatgtgaataactcctctcacacatgctggaggaaaccctcgctgtcatccacactcccaggaatggccacattagacatcttccccctagttcctgagaagcaaacccgggagagcccagccctcagccttgctgcatgcgtgagcatggagttttgcactctggccagttttgcctctagttctttgtttctggaaaaaacaggcactagggtgaatttcttttctcttttcctaccatcccatcttccttcttccttctcttttgtccttccttccttctttctttccttccttccttcctctctcttttccctccttccttccctctctttctttcatgaagaaaagctcacagaaaggcagaaggaaccacagtctattgacgtttctgactcttagaggctccaaaccgaaactcagctgtggttgctctaagtggctacaaaattagaaaaataatttgcagaaatgaaacctgacttgggatgccgtttcacaaaataggctagatggccttgatgtgtcatgaggctcccaccactgcggcctgcactgctggaggaactcctcacatctcaggctggggagcatttccacccctgcagtcaggcatcctacagaaacctgccccctgcctacctgaagacagttcacagtttcctctgaaatgggcggaagagctggacccagccacaagaccatcaaggaaagcaaaaggctttcaaaagtgagactccccagagaccaaacccaggggaagggatctggggattcttaacagactccctgggagtccaaaccaggctgtgagcttggctttgccatgaactagctctgacctccgtgcctttggtaaacagtatcaacagctgccatttaccaaatttctatggggtaccttgcttggctgcacctggggagatttggaaaatgccaatgcccaggctatgccccaagcaaattgtgtcaccatcttatgggtaggacccccgcatcaacattgtttaaagcttcccgagtgagcccaacatgcagccacagctgagaaccactgcccccacccatttggctggagacttacgtaggttcatcctcacagcaaccccgccagggtttatgaataaggaagctgaggctaggagagtttgaatcactcatccgagatccttgaggttctccctcatcccaaagcccatcattcttcctcctttgcagggctggatatacctgtacagaccccgcacagcatcagtgagtgatccaaccagccagctgaaggagctcagagagcactgcagggagacaggggaggtgccggcggagcagtctgcctgttcctggcgtttgggagggggtgcaagcctcaggcctgtttttcagcctccctcccaagtcacgattggtccctagtcctggggatccaggctgtctgggtcagtttgaacctgagcctcactcagcagatgctcttagtgtctaagcccagcggtgggcactgtcaagagcctggactcaggagccgcattcctgcctaggttcaaatcccagctccactacttataagctgtgtgcctttgcaaagtgagtgatctttctgtatgtcagtttcttcatctgcatgatggggtgacgttagagttgttaggagtactaaatgagacagtgcatatcaggattgaaagcagttcctggaacatagaaaacaagaaaatcccaggcactctaaggattacgactgtgaacgtgcagttcattgctgagcagaaactcgatggaacatgggcctgaatcagtcaaggtgataagtttaagtcaatgtttgccctttggccttgcctgttcttagctagatcagaacccctggggtatggagtccacacctggaacttcgaagggaaaggaggaacctgttttccctctttggcctcaccccagcccaggggtccttcctcctctcccaccatggtcattaccacccttccccccacccacccccagtcaaatactgactctggaagcaccttctgcatggggcagggggtggcctggatgacctctggagctcctcaccccaccatggcagtaaatctcccttcccctaccccaccactcagcctgtgccctgctggagcccacagcccatccatatggttcatcagcagcctgggaggggccctgtggctgggagtttgtttgaagcctccagaccattgaggcaggggcggagctgtggtcaggacaacagcagtgcctttcactggctctctgggagcagctgtgtggggggcaccggcccagaaggatgaccgacatccacccgcagtccttactatttgcgagggatagggcaaaggaggggcccagcccaggatggctgtgaccacattggttcacatgttaagtatgaaaggaaaagaaagaagggaaggggaggcggggaaagggaaggaagaaagaaagacagaaagagagggagggaaatagggagaaaggaaggaaggagggcaggaggaagggagagaaggaggaagggatggagagaggagactcacatctcagaagagaaaaagcaccaggagctttccttagtcaatcatctgcctgcaggttgctttacactcagggctgtgcagcccaactctaggcctcagccgcctccattctgagggccttggatacaattgcccccaaaccaggcattccaaccagggaccgtgacgggccccagctccaggcctcctgggtatcctctcatggttgagtctgccccctcctgagaaggaagaagaggcagggtgtgtgtcagcctcatcacgcattccatctcccagacggctgcctctgtctgcctgtgcagtctgcttctcttccaaagggtggtttgcagtgcagattcatggctcccagctagaaacagtattccctctgcccctgcgccaactcctgcccaattcttctgctcctcacccagttccccagcaccctgaggggactggccacacagaaaggcatgagaaagtctgctggctgtgtccacagtgccaagggttggaggtctggcagtcctctgcgtttggtgtctgtcctgattgtctctcctgggggtgacatgggcaggatctcagcgggaggtgaggctggggccaggcacttcttctccctgtaaaacactgctcagggagagcagctttgctgaccttgagctgggaccccccctttcagagtctcccagtgataatccccatggggacaattggatggccgaccctctctagcctttaggctggggggagaagaaacctgaatttggggtttttgtctctttcccagaagaggggtaggaaagaatcagtaacagcaatagcctgagctggaaacatgctcaggggccagtgcgtcccagctttgagtatagagcttcattctgagcacttcccacataaaacacaattggggtgccccaaggaggggcagacaccaacatttcaggccagaattccagacacttgactcctaggagagctttgggtaagctgtctcttcctccctagccttggtttcctcacctgtaaataagtggcctgaagccactgagggccttttagtgccagcagtgaatcctgtgactgtgttcctcctatctccctgtatcccagggccacaccacctgaagcatttttcccctgcctggccacatacctgcccccggaggccttgttactaagaagggctcatggagctggaggaggtcaggggagcagtgggaacagccagaggcacagtggcagcctttgaagataagattcctaagtctgggaaatacagaggtgtggctgtaataggaacaggacacagaccctctcaccatcacagggaaactcaagggtctcccttggggaggtcactacagaaaaaatgagaagaagcacttgtacttctgtacagggtgggtgtgaactcatcaccggcccagaggtgtaggtaggccaacagtggacacggatgctagaaaggtactatgacatcagagtgagcatgactgagtctggttaacgatggccaaaactgtcccattcccaccatccaatagcacacctcttaggcctgggagaccctgggcagactcaggaggacgtgtgctgtgctgagcctgaagaaggtggcaaagagcaggtgtgtgcacgtaggtccctcagcacccatgggacatgttcctggactgcaagcctcatcttcctttagtacagtcactctaggcctctgaaccattgcttccttggcaggaagtaccaaatcacagagaagcctcaaatcattttcttcgggtttagggaaagtcactgattttcattttcctataacatgatgacaataagggctgggttcacatcccagctttgtcacagactagttgtgtaaccttgaatgggtttcttactctctccaagcctcagtttcctcactggtaagatgaggatggtaataatgattgggttggattgctggggattaaatgagataatgtagtaaagggcataatacaaccctggccctcaataagtgctcataatgttggctatggttcaattggactttgcttgggataatagtgaaaggaattttaatttcagtttgattcatcaggtgtgcactaatattataggtctagccctgtctgaaactctagggagatacagtcaagtgtagatcagtgacataccatattcatggactagaatactcagtattggtatgatgtcacttcttcctaaattggtctctagagtcaacagtctcaaatcaagatgccattaagccttttgggcagaaattggcaagctgattctaaaatatatatggaaactcaaacctacaatatccaaaggaatcttgaaaaaagaacaaaattagaagtataaattaagggctttgtttttttgctctcaggaaccttaagactagtggggaagactaataagagaccccatgctgcttcctaggaatgtagggtactggtgaagagtatagatgctagagcctggcccctggctttgaatgctggctttgccacctgctacctcatgaccttgggcagggtacttttcccctctctatgtcctaggtgtctcatctataaaatgggatgatcacagcttcattgccatggggccattgtgaagatgaaaggagctaacccatgttagcctaaggctgcctactaggtgttggggaagggatggaagtagaatgaggacagaggttccgcccccagtaccgtatgtcctttggagaaggaaagcctagaagctgaaccacctttccaaaaagggaaattctggaataaggatctcaggctctgtgagtacagccacctccttttctaagacccagactggggaaatagctcatccagggtcacttggctgaaggttaaatacagaggaagtgtccaacaggcagggagtgtgagcaaaggtccatggcaaggagttacagcggtgcttcttgggccatgggagaaggctgtttctggagtgccgagttcgagggggcatggggctaagggacagccagcaggcatgagtcaccaaggggcaggctgccaaatccaacaggacgccccatggagccctttggcctgggcccagctcagcagccccctccccatcccccggacacacgtaccccaccaggcctggagacatttcctgaaagactaagaaagcactgggagctggacgggcggcctcaacggccagaggcttgaggccaggtctctcatggaggagcagacgaagggaggacgtgaccggcagccttcattctcacaggccagggatttcagaggaacgcggccaagtctagctctgaagttcccacttcagaccccgcccggctggagccacgggcgcctgcagtcgccaccctggaaatcagagaggcacgtcataggccacctcgtgctggggaacacgtcctcctggggcctctgtcagctggctcacctgctggggttcccggatagcccttctccttctgctgggccatggaccctcctctagccagcttcccccaatccctgctctccctcagcccccaaacctgtccaccttctcactccatcttctcaggagagtcctggcacccagaacagacctcctaggaatgtcatgtctctgtctttgaggtcatgagcagacctggggcaggaaggggaggccctgtacaagccctacactgtggctcaggcccagagaggggttgacaccaggccaaaggagggacacatgtccacagatagctcccaggcctcctgcatgctggctggtcagaccatgagagccacactggacaggtgaggaaactgaggcccaagaggaaatgtgatttgcccaaggccctatagcaagatagaggcagagcagaatggaagacctaaggctcccaagccctgagccccaagctcttttaagtcattttcatggtttcacttcattttcttttttcatttccttccttctttaagagaaaggcaggctctggatagacaggcagggacacaggcagggctaccagaaactcagaggaaagaagagagtggcccagggttgggcagcctctacccccagcccccaagctgagtggaagcccctccctcccacccagcctcagcctggccctgggggctccccttagtgggagctaccagtttgtggacacaggaatgtgcctgtggcttgcccagagaccctgagggccagcacctcaatcacagcatctccttgccccaagcagcctgccccgtctcaaccgtagcttttatcaccttcctccatgcctctctagtgagtgtcttccctgagtcagcagaacctgttcatagtcatcccttctcccagattaatctctctctctctgtagccttccctgatcacccaggctgctggagtctatctgtgccctcactgggcactcagcttttgccacctggtgttcttagtgtcatctcttgggtctgttcctgtctctctaaccaaactttaggcaactttgttcattcaacactccatgaattcaaggcctaccacgtgccaggccctgggctatggtgggattcagcagcaaacagacagactcagcaacctgccctcatggagcttacattctagcgaggaggggatgataagcatcaaagcaacagatctgcaaataagtaaatttccaaaaggctgtggagaaggaagcagggcatgttgggggacaattttaaatagggtgattggaaaagagctcacccaggtgacccttggataggcttgaaggagtgagccgtgcagacctggggagcatcctggtcaaagagaaagagcagtgaaaggcccagaggcaggagtgtgcctgccccatgggagaactgcaagaagtccaggtcaggggggtgggtgggagccatgggaaggcatcaggtcagcgggatgctgggatctataggctcacaaggacgagattagctctgagaggggtgggatgcatcagagggtttccagcagggaaggcaaggtctgacctgagttttaatagcgtcactcaggctgctgggttgagaggagtctgaaagggtggagtagatgcagggataccagcctggagcctttagggggacaatgagcataaaagcaatggatccacaaatctgttgagtaaatgtgggagagtaaataagggagagtctaagtaaggggtggtggtgaagtgattagggtgaagggacaggtcagagtctgggtctactttcaaggaagagctgagaggatcctctgaaggactggacgtaggtgcaaaagaatgttggggtcaaggataacctaagatctggggcctggacaactggaagaggggcttaccactaactgaggtggggaagatgcttcaggagggtggaccaggagctcactattggacatgtcatgttggaattgtgcaataggaagtggccaggttgagtggacagttggagcccggcattcagaggggtgatctggatagaaataagcctcagggagctaatttctatccaggtggtatttaggtggtgctattaggtggtatttaaaaccatgagacaggatgccatctccagaggatgaggatctatggtacaaaggccacttggtgtagagcagaagctgtgtctccagttgtctagagttatgaatgggtggctgatgacggggctctgactccaccgctgtcacaacaggccaactgcaggagagaggcttcagcctctgccccctccctgggatccccttgcaggctagcacaagggagggctcaggagagacaagtaattatccttataaatcaggaggctcctgccagggagaagcagggaggggcaggctgcaaccccaccccctctaagtctcttgacatttcctgggaaagtggtgtcattttatcattttattccttggtaaggcttaaatttcagctttgggaaactgacagagaggataggataggtgcctgggggccagctttgctccctgtggctttatataactcaggcctttccccacagccatttacaactctggcttctgtaatgtggtgccagcaggattaagtttttagcgcccactatattttgtgctctgtatttctgacaaaatgtttcctccctcatgatgatagctcagtaaacagaatcccttggcgcaagtgacatgctgggtggccacaggctccagggggcttcttgtgtgcccccttctcctcctctcttttcttaacaattagcccagctcaagtttatcttcatttattgacttttccctaaaattgctcccaaatacttctttgaggctgccataccaatgcccaagcaggaaaatagatgagttcaaaatggcagcccaccccagttttatccgacttgagtgccatttccccaggaaagtgggaaggttttgggggaaaagcctgatttccaggcagccaatacacagaccacaggactgtatcacatagcccagccttgcagatgagatcctgagtctcccagccacccatgcccgcacagtgctggcagtgggatactaaaaattaagcacctgttaccttcgcttctgctctacagatttcatccccatccccatctccccaggggaggcgaggtaatctgtaccaccttgggatcctttgggttttctgactagtagcccaaagggtggctctcagccccccaaagcaatgccccagggccattctacctcactttccccattctagcccccagcttggttcctgctctctgcccattcctcctagagatatgcagtcaataccactcacatcttttgctgctcctttgacagatgtattcctcccagctcagttccaagctgaaggcatgggtgagcctttgaacagtgttaagtcacattaggcacagaatcagtgagggttcggcacagcagtgctggaaagacagggtcggggaaagccagatctaagggccatctgcaactcgagagctaagggcctcagctaaactcccaaacagcaaacctggcctccccagggtgggcgaagggtcttggggccgggggaggggttgctgggctacggctggttctcccacagatggggtggctctggctgagtagtggggattgacatttcagtagccaactgcctgaggtggggggttgaagggaaacttggaatcagagggaagtttgggaacattcttcccagaatagctttaaaaataggacagctttacaaaccacccaggatgattgaaggcaggtgggatcgaagcagatgccctctggagatgccctctggagatgcttgtcagactggaacatgtgggaactctggaggttttcctgattgttcagcagatttcagaaggcagcctcggatcttccttcccccaggccctttgtgtgtattgcattcgagtcagcacctggcagagaggaggcccacaagcatctgtggagggagggatgtgtgtgtggatgcatgggtgatcggtagggggttgcatggatagatgggtcagggtgggtgagtagatggatagatggatgactatagactccacattagctggcgagagtcctgtgtgaggattcatgcagaacatggcaatcctaagtggttagttttgccgtagcttcctgttaaatagatgtcaccttcaccttaggaagaagctatattttggaagcaggtggcattactcctggctttttttgatccttggctggcaagcttaccttttacttgaaggatactgtgtcaaaccatggacttagttgccagagagaggctcatcagagcatggaggctgtcatttcaagagcccccataactgccattctcctctcgctccctagaccccttcagagtgccctacaccctgcaggtgggccttagcctctcccccaacctgatttctccaaggtcacaatttcttgggattctgataatgcagtttttgaaaaatgggccatctcatgggctaccacagatgcaagcctgtacttcaccttctcatctaaccaggagtattttaagggagtcccagataaaaggaagcctgcagtgagctcttccatttaatgaagatgcccattggggaaaaaagtcacttcttagttttatcttattcgggtttcttcaaatggcttgcaaagaggcacctgcatccccaggctctttcagatgggtagtcctattttcccaggagctctttaacctggaaaatagaactagtcctccttcctctggttccccagaatcaagttcaacacttgggtatactttctctgttgtcatcagcctgattactaagaattctgtgttgggaagaatttcagactattaggggaggccatctctcttgagggagggtttagtgtaagaatttaatgtttatagaaaacggctttttttcccccaacacaagtctttgccatccacaccctgggaaagccgagccacctggcacccacagctctcagccaggtaccatctttcctgtgctggaagtcactggaactataggtcaggacagggaagagaagcaatccccaaatgcccaggtgttggttggttggtttgttttttgagatggagtcttgtctgccacccagactggagtgcaatggcatgatctcggctcactgcaacctccacttcccgggttaaagtgattctcctgcctcagcctcccaagtagctgggactacaggcatgtgccaccatgcccggctaattttttaattattttattttattttatttgagatggagtctcactctgtcgcccaggctggagtgcagtggtgtgatctcggctcaccgcaagctccacctcccgggttcatgccattctcctgcctcagcctcccgagtagctgggactacaggcgaccgtcaccatgtccagctaatttttttttgtatttttagtagaaacggggtttcaccatgttagccaggatggtctccatatcctgacctcgcaatctgcccgccttggcctcccaaagtgctgggattacaggtgtgagccaccacacctggcctgaatgcccagttttgaagttggctaacatgtccatcattctgcatgtttatggatcagtgagggcctgtgtgccgacaaagggagcaagctggagatggtgagaacagaaagtagcttatcaacatggacatgatgacaaggaagtggccatccgaacctctgccatcccatcacacctgcccccacactcaaccccacagccacccaagggcagaaggacttagaacaggcaaagccagcccacagctgcccaggggagaaggacttagaatgctcttgcctcttttacatgctcacagcttctggaatatttgtaagtgcactcctactgaaatcgcgtgggtagctgatctgagggacttgtgtgacgagaattgtttcccctatccacactgcttagtgagtctgggctggagatctacagtttccttaagaccatcctttatagagctcaggtcttttttctgacagctggaatcacaggtgcccaccccagagcaaaaaggccatgtcagccatctgcagcactggcctccctctgcccaggtctccaatgtacttgtcagagtcccctgtggactccaaggcctcctgtgatcagccacccggtagatgatttcccagagcactaccctatagggaatatctaaactatccctaatttttctcccttcaaatccaacttgtctcagtcctgtttttctcataaaagggcaactttctggctgggcacgatggctcacacctgtgatcctaacactttgggaggccgaggtgggcagatcacttgaggccaggagttcaagaccagcctggccaacatggtgaaaccctgtctctactaaaaatacaaaaattagctgggggtggtggtgcgtgcctgtaatgccagctccttgggaggctgaggcacgagaatcacttgaacccagtgggcggaggttgcagtgagccaagatcgcaccactgcattccagcctgggtgatagagcaagactccatccaaaaaagaaaaggggtgggggggcaagtttctgagttctgatcccttgaactgtgctggcatgaattgtagctgatattttaccttgtgagttgactggggatttgctggggagacagagccttatcctgatggtgcggtgttaatgggctgacctcaggcactgtggtattctggggtggggggatgctctgaggcagaaagtgcccttccacgtgttcctcagattcatccaatgaggcctgcacttttagtcctccctgggtttctctcctgtaaaacaggaatcaggcagttagatctcatagtacctgtgtgaggtaacagggagcatcttactaacctattctccagatgcagctcagcaaggccgagtgacttgcccaagctctgctggtactctgcactctccttggatgtttgcccaggaagcagagccctcggtggtgggcaaagccagtagcaggtggagagagaccctgccaggcctctctgctcctctgaccacagtcagagtgtctcttatcacctgggtagcacttcctctgcccgcggcagagccagcgccaccaggggcaagcagacgggtgaggaggtgccagacaggattgatagttccagcctcctgtcctttccttctgcagacctgtgagggagctggtgttatttttatctggggacactggcgtgggaggtatttgttaacgtcatctggtaaacgcagttgaattatctgttgtccaaggaaccctcaaataagtagtgttaagcatgctaagccgctcacatttaaagatacagttagactcctgggagagaatttgcttatgctgctgccatcacaactgaagcccagagctgtcagttccagagcccgggctttatttaaccctcttcggtttggggttcatcacacataagggctcgtgcttttttgaaaaccatgcttccctatctgttctctacaagtgggaaagtgcttgcagtctgtgggttcagtgcagggacaggttgtctgcacttgctactgagtgtgtgttaagttagcacagtactgagttccgagtcccatgaagtaactgtgtggcataccggtgtgtgtcctgtgcagcctgcagctttctaaaggcagtttcggggtgcacccccacctgcaggccttacattatagccccctctcttaatgcgctccccagtatttctcaagtgcctctggatcttgctgtgtcctgagaagttgtcccatgggtgggagcagtgggcaccattgtcactctcagcagtggttctcaaccaggagtgattttgcctccagcagacacttggcaacgtctggagatattttatctggagctttcacaactgggggtgaggataggggcttctagtggcattgagtgggcagatgcctacggtgcacaggacagcaccccccaagaaccaatgagccgaccgaaaatgtcagtagtgccaagaatgaggcaaggctgctctaatcttgaggcagatggagcctcctctcgctgccaccagcgcgtgacttgacaggaggtggctgggtcagcagggctatgagtggagaaggtgaatggtgccagccagcagcctcgggtcacgcggagcagttcagaaagtcttactgagctctgcaaggccaggatcaagccagattttaaggggatgataagcaaggtgtggtctctggccataaagacaaaccatgcagttttgtagaatactctcagttcacaaggaggttgtatatctcttgcctcattcaatcttcacaacaacttatgggcttgatgggacaagtagaatcagccctattttgtggatgaccaaactgaggcccagtggggtaaataacttgcccaaggtcaaaaagcagccccagatgatggatttctggtctttcactagagcatttggatctctgtgctcctcttccctcttgggtcctactggatcccatgttggtgaggaatcagtcctttcttgtatttttatctggggacactggcatgggacgtatttgttaacatcgtgagtggacacctgaataaggacagaatgaacttcccatcctagatgccaccctttctcctggggaacttctataatagcccaaagccagagtaatttcattttcatgccttctctggccaagctcagatctagccagggacttccccattaatataggggccagaagcccacctctctctgtgcacccagattatttcctccctggggttgccactgccttggagccccccatccatttattcagttaacagatacacactgagggcctccagtggcctagacgcagcaggtacattgccgaataaagcagacagagtttctctgcccttgcagaacttgcaatccgagtgggagaggcaatcactgaacgcataagcttacaggtgtgtcatttccagttatgatggggccacacagaagagccaacacaacacagtgagggatgtcacaagagtggagggcctacttagagaaggcagagggcctctgggaggagaaaacaagtagaccgagacttgaaggaggtgcatgtgcaccagcttttcagcagccggaggaagagggtccccagctctggttagagaagcaccgtggggtgaaggtggggcaccttggtatgcatggtgacaggatggatttttcttccccactctaccagtatttcacagtcagcatccccatcatcagaaatatcttgatggcctccattcacacatcaagtcaacgtgagtccccacactgctgttttatacctggcagttttgtactgttttgtactctctgccagatactcaagagaggaaaagaggaataagatacccaagaggcttacagtctagccaaggaaataaaacatgcaggcaaaactagggccagccggaacatctgcccccatctccagccagcccatcacattccccaccctcagtcccctgatgtcagtagccacctactgttctccctcctgtctgcagagataccttccctcttgctgactccaacacccaccatacactggccaaggtgtgggaggtcagccaggctaccccataacacctggcatggataaccccccacacacccatgtccttggtaagaccaaagaagcaggaggagcaggcatctgcggaggtgctcccctggccaggcattttcatcatcacggtgtttagccgtgtttcccttttctgggtggggaacgtgagacggtagaagacctggggcttgcccaggtccaagggctgagtgggagtcggaccagagtgcctcacccaggcctgtctggcattcaaacccattgtgcatatcttgacacactagtgattttcatgtatttttagcagaagagttgtttttccaaactcaatctcaggcgtgtcctcaaccacatgaaacagacctggcaaagggcctctgcctgggatccaggagctttgagtctgcccactcaactgcccttcacccatccccacaggtggcccaagcctccttgggaacaacacaaggggcccatctagtcttcagaccggatctcagaacgaatggagaaggtctgagcacttccttcagggccacccccacccccggcactgctcagaacagacctcactgagtccagtggggcagaaccacacagaatggcacactgtgagagaggggcccattcagacagagcccggtgcaaacagctgccatccacgtctgcagaaatggcaggcacaacagtcacttcctggtctataaccccatatggtctccagaggcaggcacaggccaggatcaccatttcacagacgcaaacgttggtctcccccaagctccctagactttgtgtccttctctatcctggctccctccgcctccggctgttcctcaactgttgtccagtagacattttgggatacggcttagataaaggatgtgtgcactcccattgcagcttccttgagggataatgccacataaatgttaacatgacttttaaagaccatctgtggcaaagttcaaagttgtgggtggatgtgagcttcaggccgagtcattctggaatccccattataggtcaaatctttttgtgagcatttcaaggggttttctcaaattctataaatagcttagtaacgcctgtgtattcatctatttttaaagccagtcttccggacaatttcagaagtaattgggccactcattgaaagtagggtttcaaaagtcatttcttcagcttccaactgcttccagagcagagggatcccagatgccatttctgcctagggttggggacccaaccttcttagtagaacctggtccaggcagaaaccgtggagaagactctaggaatctccaaaaagctggataagctgaattctggccccagctcccagttcctcccacaggaaaccttggatacaacattcatccaacttatgcttcagtttctcacatagcagaatatgggcacagtcaccctttgctgattaggaagggttattacacctgtttgcgtcactctgtcacctgggtgcaggtcaaaggtctctttcattttatagataaggatgcagaggcacggtgactggcctgacagtcacatggtgactttccattttatagatggggacacagagtcacagcagttggccagtcttgctgtccttttattttgcggttggcctgctcctcaggctgaggcctcagtgagcacagccccactctgtttccacagagagcttcatgtcatggataagacctaccacctgtgcccgggcctaggcctggcaaacacctgtctccaagccctcggcctctctcctgggcaggatggcagccaggcagggaatatccgaattctgcagagacaacaactcagccctctcctctgaggacctggagggaagtgtaaggcaggggtgggtggctgtcatgtctgcatgatgaccttttcaaacttgatgccttggggggtccaaagagcaccaggcccaggatcagagacctgggttccagctctgtcaacctcagaaggtaggcagatcaaggagcctcatcctccagtgagctgctgtgtggggcagagccaggaaagctgcaggaagtgcctagaaaggcagagtgctgtgtagaggtatggcgagacagtgacatgaacatcaggcaggcggcagagaagatcagggcgccagcacgggcaccagctactaagtgtgtaatcactgagggctgcccttgagcctgggaacttcagccccctcacgccccttgacctgacaagtggtactaacgtcctccctgaggctgagtccagtgacaccttgctttgaggaattcctgcttgtcccactggtattcttcatctgtcagacaatccagccttctctctctgctcaggctgaaaggaaaacttccagcctcttctgagggcttttcaaggccacagccacagcaggtgctggctcccttgcctgagaataaggcttcgcgcctgcctaagtgtgagacagaattcctgctggatcagcctgacttctcagcttctctctgctgcaacccagcgccatccccccgcctccctgtcccctcctacggatcagcagagctgagcctacctgacctgattttgccaatagaaatatgctgggtgctcacagcctgggaaacttggaaatgtctccagagtgatccagatttagctggaagtggctgatggctgttcccagccacagtgtgtgccctttgtctagagccaactgctggggagaaagcatttccagccacagtgtcatgaaccatcagtcacagagaatgtgtctggtaattttttattaataatagttaaaggatcggcatttggggcttgattttcatgtccattgattagagcagattcaagataatcctcatcatatcactctctcttcattcttttggatgggacagaaagggcagcaatcacccagtacatcgggaatttgacatgatgctcaggagagtgtcaggcacctgtgacagccacccgatggtcctaggtaaggcctgtgattgcagggggcagctgttatttctgcgtgtggtccagggatctgtcactgagcccacctgccccagctgcagaatgaccacatgacctggttctgtccaatcagggaaccccatcaccacagccacagtgattgggctgagagatagtcatgtgatgagcagggccagtcagaatccttccctgagatttgagggtttgacatttggggagggggggctctgtcttccttttggctcaagaaccattatgagagagaccaggtgctgctgaccgccatcttagccatggcaaagggagaacctgtctgtggcagcagaaaaatcagtcagcatgcaagtcaaagcccagacaagggagagaggggagagaagggaggaccagccctggggttgctgtttgagccctggggacaggctgtgtcctagggcccaccttccatgtaagacagcccaggcctgtgtgcctcttcagctagtctgagatggtttctgtcactggcatccaagaatcctcagtgtctaggggcagagcagagtgaagcagtggaatggtcaggggtcgttggccagggagatcagggatacttggggaaaggttcaagtccacctaaaaagggacacacccaaacccaaggagtagttcagggcccagctggcatcagaactcaagcaaacttgtcccagggcggaggctgcagcccagtgcccacatggtccccgtctccctccagacaagatgtgcagccaccacagactgttgccagagtgcagagtgacatgcaggtcagattctgactgctccagagtctaggtgtggctgagtcctcagggccaggcctcagggctcagcaggactgagccaagactggcagctgtggccaggacgtggcatgatggccagctgtgagtacagcccagcagacatgccccttggctgggctgcatgtgcagactgccaggggtcgggggcggccaggtccgaggcaggctttggtggatggagtaactcaggatacagctaccaggtctctctgccgcttattcagcacctactttgcaccagatacgttgcacatgttactcatttaagccaaggaggtttgcctgacccaatcagactgatgccaagaccttccacgatgctgccctaggtgggtgtgtgagaggcagggtccatgggctgccacccaggacccgggcaataaccagatcaccccttccctgcttctcctcctatcctgactccagctctgctagaagcactgcccacccagcctcagtgcccacttctctgactctgcccctcaccgtccagtccccagcatccaggccccagtctcatcctcatccccagggcctgggaatccattattttgtcacctaggagaagcctgttgtactgatgagttctttttgtcccaagtcacaggaaccaacttgaggtggcttaacattgctaaatccttttctgtaaggattctgaggtttcatggagcccagaagtcccagggaaggacagaagggaacattcagggtcgtctctcaggctgggggtaacctgatgtgtcacagtgtctgtgggttccatgctgcaggccagccctacgcttgggaattcccagccctctgcttcactgttgataggaacaggtgccaaggaaggactgcactgtctctctgagctggaggctcctgtcctgggctcctcccaaatgatgatgactggggtgagaaaagagccttccaggaactacccaaggccaggtctagccatgggggccaggccgcaggccctgggctgtgtgataggaacggaggagtgagggggcttcactggtgggggggaccaaggaggaaagcctgccggggggattgcaactagcctcagcaaagccctgaggggagagtctgacacaggggagactcggggttggggtggagctacattgacgtcaactgtgaccccaccacaccaccaaagggcggctctgcggaatgtcgtggccttacttgaagcaaccctgggaagggggaaaaaaaatccaataagccaagaaacatcactgtatggcaaaaatgttacccacaaaagtgaaacaaatgtcatgagacggtggccttggagcagggactgggactggcccagagaaggtgggaagaaaatatcaggagtgaactgtcagccacaaatgaaagaaaagatgagacaggcatacatgctgactctgtactcttatgtcttagattaacagccccctaccctttggacaggttgtcctcttagagaagagctgtctgaccacgtaccgtgggatatttatgcatccggtccacacacgttcattgaacacctacaacgagccaagtcccattccaggggacatgaagatggctcagaaaacaggattcctgccttcaggaagcccttctagcaaaaagtcaggtcatcaacagacatcagacctagtggaggtgatcagggctgggaaggaagcatagcagagtcggaatgaggagtcccgggggctgtggtggaggggacagccagggaagcctccctaaagagggaatgtgggagcaggaaggtgaaagaaggaaagttggggccaaataaaaaataaagcaccttttatttgaaaattagtttcctcttttcagtataaagaattctgtcaaatatgttttttaagccatgcaaccaattgcccgggagaagaatgcctgggattgactcctggctgctgggctcccacagctccccatggtctgtccctcccacatgtatccagcttctcaaggaaaagaaacttcctgctagcagtaaataaaagtgcactttctcctccccactggagagatggcaacagcagccacctctctggacagaaacaaaccagggtcactgggggcatagcgtttggatgggcaaatttccctaggccattcattttccaagagggagcccgaaatgagggtgagtttgcagcgattggtaggggctgcccatctccctcaggaagtgtaaaaaatatatgcatcatagtccttgtgcctcgactacccccaaccccaccctccagcagcatctccctgtggtggtttgcgctgctgggtggtgtgggggtgttttttcccctttgcctgtatacagctgtttttggcttggccactgcgctccaccatgccagagctcatgtggttatcccgagtgggaagaatttcccagaatgccttgagaaacctgagacactgaatggctttcagggcttattgatgtggccggtgcaggaaatagcagtacgtcaataaatagttttaggcaggaaacggggcttaaatggtagccttaaagtttggggaaaggcactaggggttgctgggaggtagcctgccaatcagatgagaacctagagccaaataccaggctttgaaatggctgccaccaatctgaggccccttgctgcttttggatacaagaggctgaggttaggggcagagctagaggaatggcttgtttcggttggcagaaaggactccttgttccagaggaaaagctggcaacctataacatgtgtcaagaggagacacacaggctgggttttggtggcctctgggcggggcatgttcacaccccagttccccacccttctcgtgagaatcactgctgactggcagattaccagaagaattccactgtcctaatgcaaaaaatcaaggaaaagggtcacaacctgccagtttcttttaaaatagctgtttttctgattataaagagaaacattcacagagaatcagaaattcagaaagtaatgtagagaataaaggtcatccataattccgctattgagagacaactcctgtgaaacactatttctcctctttctttttaaaaaaaactctattcatggatgagattatatggtaaatgcaatttcagttttgcttttttcatttaacattatataaacattttccccatgctattgtaaacgtttcataaactttttgttgttgtgttttttttttttttttttgagacagagtctcgctctgttgcccaggctggagtgcagtggcgcaatctcggctcactgcaacttccacctccaggtgcaagtgattctcctacctcagcctcctgagtagctgggattataggtatgtgctgctatgcccagctaatttttttgtatttttagtagagatggggtttcaccatgttggccaggttggtcatgagctcctggcctcagatgatctgcccatctcagcctcccaaagtgatgggattacagacgtgagctactgcacctggccacataaacataatttttaatggatgcatgaatcatcatttacttaattgttcccctgttgttgggtgcttaggtttttagatttttatgtgcattaagcttattttttctaatattttaaattgtttccttatgataattaccagaagtgcaactaccagagcaaacaataagaactcttaagacttattttaaggattttcagaaaagtcataccaatgcccatatataagtgcctgtctcactgcatccttaccagcattgacaattaccattttaagttgtccttatatatatagatgggaaaaagacgttttcattcattcaattactactgatattgaattaagttgttttcatatatgtattagtaatttacattttgacacaggatttacctcttaatgccctttccccatttgttcatgagggatttcatacttttattacaaatttgaacacactatttatatattaagaccattgccctttgtcacatttattgcgtgtattttcctgagcatatcaattgtcttttaatattttgatgcattcttccattgtcttagtgaagaaagcccccctccttccagaaatgtgagaaatactctttcattctcttcaaatttttggtcctttttttttttttttttaacatttgactctttattccatctggaatttattttagagcccagtgtgaagtaagattctaaattattttcctcctgatacttagacagctgtccctgcactgttgcttgagtgaataatgcttcctttgccactgatttgtggtcctcaagggatcatgtgataaacctttgtggatgccaaatttgtttctaggctatctgatctagctctccattcggatgtcagctctacagcctcttaatgaataaagctttattaaggataagttaagagtagtgtaactctttccaatgttgttttgtttttagttatttcccttgctattctttcaaattacttttaggattattttttcaagtcttcatttccttttctcccaaaaaagttcacattgggatatggagtacagattgatattaaacctgtgaattatttcaaagagaattaccatcttcacaatgctgtcttctcaataaggaattgtgtgtgtttcttcgctagttgaagacgttctcttaaatctttcagttttgttaggcaattttctttatagaattcttgcatatttcttaataatgtcacttaagtattttattgctttattaaatgagctttgtacattaaaatctcactagttaattctgtcataaaagaaagctgttgattttgtgtattaattttgtatctaaatattcttattaattagtcactgaactctcttgttaatgatactctttattaaaggcttctctcagattttccatatatttaatcaaatcattttatctcttccattctaagggtcataggtgttgctgccgttttttaatcaagcctattgaagtaatacattacatttatagatttcctgatactaagtcatccatgccttcctgataaaaatctacttggttataatggatctgtttgttagtatttcacttgggattttatatctattcacattagcaagattaacttgtagacttccttatttgtaacttactatcatgagattttgtttatagggaactggttggaaagcgtctctttttctatgttctgagtcagtttgcaaaggaaagcagttacctaattttttggaagtttgaatgaacttacctataaaaattgtaagtttagagatttccttataaaggtaattctttcataactttcattttagcttatgaatttttagtttattctggctcatttcttttttagcaaatgttgatttttttaatgaatcacctatttcatcattttttcaaaattatcaacatagagttataaataattttattatactttttttctatatcatatctgttttcatatctaattttatttctgtttcttctttcttgattttatatgtgatttcctttctctatttcctaagtaattaatttgggggttttatctgtattatgtccttatatttccttagctattgttggttttctaattgttttagttaaatgtttagatcaacattgtctggtagaagtataatgtgatctacatatgtaattttaaatttaataatatgtgttataaaatttcataggtaggtaatatttttaaaatatgagacattttacattctagtttttatactaagcctttgaaaagtaatatctgttttacgcttacagcccatatcagtcgggatagccacacttcaagggctcaatatattgtcacatgtggatagtggctaccatattggataacattggtttagatgatatattttcttccattatttagtggccaaaatagttaagtctataaattgacctttcattatagttttgaccacatcccacaagtttttatagttatttcctagataatctaatacaggtattgtatatttgagtatgtctttatttcatttttctttagaagaataccttttaagtattcaagcaattggctattttttaattgttgttaattcatagtcccagtatgtaacctgtacaatttctatgttttgaaatttatactgagatcacagcttactatgaagcttgtttcaatttaatcttattaactatattatttaaatcacctaagtcatttgttttttattcatttaatcggccatagaatgttagtggttttatttcctgatataattcttcctttctggtttttttcctatgtttcttttttttttcttatgtttcaatagcttcaggtatattcaaatctatactataaagtctataacattttgtgttatctctttattatggattgtatttttatatataaaaccttataattttatttaataattgttatcttaaaaatacttcccttttactactactttattttcatttgctcactcttgtttttacccatccatttatttttttatatcctgttttcagttctgctagtggttactagtgtttacttttagcattttaaaggcatactttcattttttttctctgattcccaagcttaagaaagatgcaataacctgtgaatccttatggcctaaattaggaaatgttgtgtgctttacagacttctatccccttcccaccagtatttactaatctctagtaatttaatcttggattattaagtcactactactataaaattcttatttaaattacattttaaaattaaatatcttctcttccaaggattatttctggcttttgattccattgtataaccaaaattataatgacttattttaacttaacttaataagtctacctggttgtagtttcagttttcccttctgtttcttctataccatggtttcctcagagttaaatcataaattttgttggccataacatgcattcggaaagttctttttattttttattatttttaattgtagttttaaaataacataaaatatactatttcaagcatttctaagtgtacagttcaatagtgtagagtcacattctcatgcaaccagtctctaaaacttcttcatcttgcaagactgaaactctctacctattaaccccccatgtcccctgctccccagctccttgtaaccaccattctactgtcgtttctgtttatgggtttggctactttagatacctgcataagtgaaatcatgcagtattgtctttttgtgactggcttatttcactttgcataatgtgctgagggttcattcacgttgcagcatgtgtcagaatttctttctgtttttaaggctgaatagtattccactgtatgtatatatcacgtattgttgatccattcatctgtgggtggatgcctgggttgctcccacctcttgtcagtaatgctacatactgacatctctttgaaatcctgatttcatttcctttggatatatacccagaagtggaattgctggatcatatagtaattctgtttttgatttttcgaagaatcaccatactattttgttttttgagatggagtctcactctgtcccccaggctggggtgcagtggcatgatctcagctcactgccacctccgcctcccgggatcaagcagttctcctgcctcagcctcccgagtagcttggattacaggcacccaccaccacacctggctaattttttatatttttagtagaggcggggtttcaccatgttgctcgggctggtctcgaactcctgacctcaagcgatcgacctgccttggcctcccaaagtgctgggattataggtgtgagccaccgcgcccagctggccatactatttttcatagcaactgcagcattgaattttttaagataaacatgtaggagtgatttgttttagaacttgcttatgtaagatctttctctcgctttcactcataggcaggtttgttcttttcccttcaaactcatgaagacgttgccttcatgtctctgaatttttaacctcaaataaagaagtataaggccaaccagatttttcttcctttgtaagaagactgtcttttgttccttcgtagctgtttttaaatttttctttttctgcgaaactaaaaaagaaaattcagcgggggcaacgtagaccttgtctctacaaaaaaatttaaaagttagccaggcatagtgttatatgcctgtagtcccagctactcaggaagctgaggtggaaggatcacttgagcctaagaggtcgaggctgcagtgagccttaatcgcaccactgcactgcagcctgggcaacaaagcgagaccctgtctcaaaaaaaaaaaaaaaaatgaaaaaagaaaagaaaattattccgctaagtaaaactggggcagggcaagggacttccggaacactgtgaacactttttacccaaagagtcaactcatttttattattatttattttcagtgagaaagtttatttctctgctctctttgttctgtgtattctggtatgctttttgaaaacttctctaattcacagactagatgtccactctctatcttctctatcgtttttctttttgtttctagtctatttatctttgtattcagctttctggtctatttatctattctgctctctaggtggtttccaagtttatcttctgcattactttttctgcattatccattctatcctttactgcctccaattcattttgattttgctgttggatttctagtttccattggctctctcctaatcccagttcctgtctcacacttcatttcagcctgagagttgcttagctaatcacaatcccttccttcgaatgcctattcacacatcatagaatctatattgtcattctccttacatacaagcccacatgttttgcacttgagtttttcattttatttatatctggttgattgtcattaatatgttcagagttacacatttccattaagttttcacgacactgctcctttattctgccaggcaggatttttgtgtagatgccatattgctctgcgcctccctcaatcctgaatgagatcacccctgtctggtcttttgtgtttgctgtgcgcatcagccttggactagcttggtgtctgcttaggcagagtctccctctcagacctaaagctggagggtggcttcatgagctcatctcaaatccaatttccaatatttagcaggcattcaatctcctagtaacctttgctagcccaaaacagaatgctctcttgatgccatggatgatcaggaagaaactgagtcaagagctagttctttgatcagatgcaatctattttttaaaacttcagttccttgtacacactgcctccaagttttttcctgccccagagggctttgcctgagagcaccatcccttaaaggacacagcatttcacccagtctcctcctgcccctgcactgccccgaatctccaaggcctggaataagggtggtgcagatgggagctgccttaatacacaggcacagggctttgctagtactgacagatactgtctaccagccagagacagatagaggaaggggctgaagcctcaagctaccccctgtctttggtcttctgggtcccctgggcaaccagaatttgttggtgacagcactttagttaatgatgtcacctcctgagtctgggaggagtctgctggggaactgttatcttccttctcagtgttgctgtgggactttgttctttgatgtgtgccttcatgggtatttttagggaatataaggaaatgacaagctgggggttgatagaggggcaccattttaacacccgagttagcacttgataaaggcctagagttgtggttcagagccatggttgcacgttagaatcagctggggagctgccaaaaattaccagtgtctgagccccaccctgaccagttacacaagactttccggggtggggtcccaacatcagcagcctcagagttcctccaggtgactccaatgtacaaccagggcaagagcgtttaacccagagcagagaaggggcttaatttttcattcaagttctagtactgtgtggccttagtcatgtcttttaatatctttgtgccttagttgtccccattttaaaatgagaatggtaatgcccactcttgctcagatcacataagaatattgtgggataaacaaaggttcatgagaatgaaaccaccaaaagatgtgtgacttcaagcccagtagtgcagggtccttggcaggccctggggtggcaggcaatgtaattcattcattcacaaagaccctgaacagctaggaccccctgtgaacactgcctgctccaggctctggactagggagaagagacaaagctgtcaaagatgctgggcacgcactacttgcggggtccctggagtctcttgtggtcccttttcaccctgggtgaaagataaacagcagaactctacaatcatacccaggtggacaattcagtgagaaaggagtggggaggcaggaggcctgaggggtcaatatgaggcccatgaggtctgcaggcatggctgcacttacaagggaccgtgtggacaaatggcttcgtggaaagtacagacttggagagtgactaagcgtgggctctgatgcactactttccaatttaaaaacaccataagagctgctcttgccacaaaaacaaacaaaacaaaaatgggtaactgtgagatgatggatatgttgtttgcttcactatagtaacctttttactgcctatatgtatcccattgcatcatgttgtataccttaaatatacacaaaaacattttttgaaaaataaaaaacaccataaggagaaaaaatgtttggtctccagagcaggctgacgtcagtttgaatcccagccctgccactggctcatagtcatgggcaagttacacaacttctctatcctcagattctccatctataaaatggggcagtaataggacctgccttataggaccattgtgataactatgtaaaataccacaattaatatccttggctcagtgtctggctcacaaatagcagctgctgctgttactgttttacatataaatatagatatcaaaatagttatagatacacacacaagtatatacttttttgtaactgatgaaactcaggtcattataagctgtggcctaggctcatccaaagctggcactgcagggcttctcagccagcccctgacctgccacctgaggagaccaaggcccaccctctagattgcaccttcatcactcacaagggacagatgttaaccaagtcatctctgagggccttccatctctggagatgctgagattctggtgccaaggatgcttggctgaagtcagcagtggtgtgggggactgggctgtgggaatgctctgagtcacattctacaacctgtcttcccatgttctattttggtggtgacacagtcacccagaccaagaatcttggcgtcatcttggagtctcccctttccatcaacccttacaacccaccacttagcaagtactattgaccttcacaatgtctcttgtgtcactcctgtattggtcagctattgaggctgaacaaacaaccataaaaatctcagtggcacgcagcagtaagcgtgcatgtagatgatgtgtgtgcaggttggttgggggtcacctgacctaggctagacttaggtgaggccctgtcgcatatgttgcccaccttctccctgggaccatcaggctagcccagagagagtcttcttaggatgacagaagaaacatgaaagtcaacataaatatttaacgcctcacatcagaattggcacaccatcactcctgcctcattctattggccaaagcaagacatatggccaaaaccaaagacaagaggtaggggaaatatctttctgaatattatttaagctaccccagattcttatctttcagctctcagagcgctgaggttttaatttcatcctgcctggatgcttgcagtggcctcctgtgtggtctccacaccttagctatattaacctttctgttgagcactggtatgactgtggtatttcatggccccatccccaaaaccttccctagcgaccatcccatggaacccagctccttggttttttatactttcttctcttgtatcacagtgatgaatgaatatgtcttatcttagctcctagtgcagagcctgtcacacaatggggcaataatatttttaaggaggatgaatgaatgaatgaacgaatgaatgcctaggcccctcgagggacgggctgtagctgtgtagcccagtgctggggcgctagcccacatggtcctctgttgccactgctgatgatgtgtgggtgggcagtgttctggttacccccagtccaccacgcagagggcatgacttgggggttagcaaagggagatggtttagccacagggagttaagtggaaaagtgctgagtctggggagggtgtcacctcccgttctacctcatcctcccacatcagcattgctgtcagtgaaggaggatgaccagcaggtctgggcaatgcctagaggcaaggaagctgtgtccccaacctggggacacctgaagaagaggtgttatggccccaggtcagggtggtcccagccacagagagtgcaatcacgcacccccatcctcatttaaaacatggggtttgcctgctgcccaggagcagccccaagacaacagatgctctgcacagcagggtggcacccaggcccctccccagccccgggaggctgacgcggtctctcatgcctccacagaaggacttcacggtgcgcgaggagctgcagcagcaggacgtggagcgctggctgggcttcatcaccttcctgtgcgaggtcttcggcaccatgcgcagcagcacaggcgagcccttccgtgtgctcgtgtgccccatctacacctgcctcagggaggtaagagacctgccgcctgtgccccctgcacagccagacagcaccaggtctggaatgcgtctcagataaccgggacaaagctgtgagggtaggctcacttagaaagggacccatccgggccaggcacggtggctcacacctgtaatcccagcactttgggaggccaaggcaggtggatcacctgaggtaaggagatcgagaccatcctggctaacacgatgaaaccccatctctactaaaaatgcaaaaattaaccaggcgtggtggtgggtgcctgtaatcccagctactcgggaggctgaggcaggagaattgcttgaacctgggaggtggagactgcagtgagccgagatcgcacactgcactccagcctgggcgacagagcgagactcggtctccaaaaaaaaaaaaagggggcccatccttcagcaaagagatgtgcaacagcagtcacttctgctccccaaagccaggtctttcttcgttgggtttatataaagggaaccagcacccccttcccccgtggggtgttgtgaactgaggctccagtcattcccaatcgggagcactggctgcagaggggaggcctatggtaagtgttgtctcaatgagcgatcttggaattggattggactggtttgccactggattatttattctatgaaaacatattttcttctaaatttcatctgaaaaagaaagaaacaagaatgaccaaggaacttttgagaagcaggaatttagcaggtggttgcactgccagatattataactcactttctacacccctctggctgctgtcaggggagagaattgaaagggggcaaagtggaagctggaagccgagtggggctgcttaggctgcgcagcaagaggttggtggcttggaagacagcctcggagtgagggcgaagagcacgtttaggctctagttgaatttctgagttagagccagcaggactcggtaatgtgagttggagggaagggaggaggggacatgggctccccgtttaccagcctggtggccccattttctgagatggaggatactggatgagaaatagaatggggatgaaaagcaagagtcagttatgtttgagtcgcctgttagctgtccctagggaactgcccggaggttggccgggtggaagggtctagagatcctgaagaggtcacgcatggaggtaggggatagagggttctgggaagtatcgatatgcacctggtgctcaaagctggggaccaaatggaaccacgcaggaagagagtatagatggagagggagaggaagggggcgtgtaagaaccctcacagcagcccttcactgggacctggacgcctcccccatgttgtaccctcccaccaccggcaggcctctgcaggggctaccaggacacaaggaggaacagcctcctgagaatcaaaggaccaggacagaaaagtgtcctgggtttggcaacaagcaggtcacgggccctgggtgtcagcggaggtgaggacaggagtgtggacacgtctttcgagaagtttttctgtgaatggcagcagggaaggagagctgtggggtcaaggggcatctttatggttttgaaagaaagacaataatagagcaatttaagagaagggagggagtgtatttatgagtgtttttgaagcatccgtttatagaacaatagcatgctcattccagacaagcacagagcacacagttctctctcgggtgttttgtaaacccatgagcctctgccactccatgtacccaaaccacatttcttaacaaatgcacttgaaatcagatttgtttcgcagattcagacaatggcctctcctgactttgtttcactctcaaagtgccttgagctcagaatgcagctccaggagggctggcagctctgctttttgcaccctttggaatgacatggaggctaggagcgggcctgcgtggcctcttgggtcctcccatccttgcctgcattgccctgtgccctggacaacccacctcgagacagggagcagcactgttctagggcagtgacctgaattgccccaacacgttccctctgcgtgatctggacacctcctggtgttgtcgtcacctgctcctccgagagggaggcaaggctgtagccgagcgccggccctggctgctgggacacttttaacaccgcctgaggtagtgcaaatattccagtgtgagatccggaggtgccaggagatgtgtgcagacaagaacaaagagccacgcctaacgcacacttgttggatgcattcaaattttcgggccagtttgacaaacacagacccatccaatgctcatggtaaacttgaagaataaataaatcacctatggtcttctccaatttgtaaaagaagagggcagagccccatgtaccaagctaactagggccgggctgcagcagggttcacatcctggctctgttgttcatcaactgcaccacgttgggaagcatttacctgctttgagctttggcttcctcatctgtaaatggtgctcatgctgctttctctgcaaggtgcagggagggtggcaaggcatggagagacagctaagtgcactagggacaacgaggccggaggatggaaggaagtgcccggggcacggcgtctggcagagagctagttgtcatctaggctgatggggcctaggggctgagcacatgcctaatcttaaagggctacttgggctgagtgtcctgcccagggacaaacagctggtccatgccagagctggtctggagctcctgaactccaggtagggctctttccaggagaaatcttggcttccctaaaactgggccaaaagaaaagatggggacttaaaggggtgccctacggatctcaacaatccttgtgaacagcctgttgcctttcgcagctccgtagggacccctgaattcttcaagccatttgctgcctcataaccaggcttgacctacatccctaaagcaggttgagccggcttatggaagtttccagagccaaaggcacagctgcagccccctccatgctggaaaagcttaggctttccccctggggccatgtagatgtctgaccccaaatccacagcacccactttgccctgagatccccccaactcccagaaccacccgcaggcccacatttccagctgcccactacacctgtcccaggtcatacctcaggaccctccaaaaggatgtggtcagaactgcaccccaagaccccctgctcagtgcagctctcatgcaggcccccacccatgctgcctgcctccctgcagccaggtagcagccccagaacccacgccacggcctttccgcagtcaagtcactcactccatcccctgcgtctgtacccccggggctcccctgcagtgctttccttgctgcttctgagtaaaacccaaacccacaggccatctctgagtgaagggtcttgctgagggtgaggacaaacctaagggatagatgcaaagtcctcaccatccagcccgtctgggggtccttgtgctcacagaggcccccttcattctgaggtccaagcttactcggtccccacgctcctttagctcaagcatgtgcttagtccccaggcgcctcagcctggaggacacccagctctctgggagtccctggggacatcctttcacaccctgacctcatcaaattaaccattctttaagttactcaagcttgaaactttggagtcatctctgcctctctgtcttcctgtccctgacacttcttcctaggcccagtttgaagtcaccttttctgtgtggcaccccctcagcacaccaacagcttcctcctaagggacctggaagtgtcctctgtccttactgctccatcctcaccccagcctcttcacgttgccttgtagcagtgttcagtaacggtagcagcacatctcactgcatggacgcctccatctcaatcgagtgcctcgtgtgttcttttctcttttaactcagacagcactttgaagattatcatccccatttttcagaggagagcagagaggtcaggcaacttgctcagggccacacagccaccaagcggtagaatcagtcctggaatccagatctgaccaccccatttcactgccttgcaggcagagcaggggctactctgtttgttttcttggtgcataactcagcacctatatggtaggatcccagtagatcttggtggaattgattccatttttgccccaactaacatgccaatcagagatccttcttccagagatgaaaaagaagaattttcaatgtgtgcttttcttgtttaagaacaaatagtttctgccgaggtggttttcaaagtgattgaagaagattattggtcatctgtagctgcaggagtctccttgctctgctatttacaactcatatttgcttagcaagctcttttttattttttaaatatttttgaatttctatttttagttttactgtggtaaggatactgaatatggatctaccctcttcacaggtttctaaggataaagtacagtattgtatccatagccataatgttgtgcagatctccagaacatatgcatcttgcataacttaaactttcacccattgattagcgactccccatctgcacttccccctagcctctggcaaccactattcgttgcttctttgaatttgactattttagatacctcatgtaaatggaattatgcagtatttgttcttctgtgactggcttatttcatttaataatgtcatcagagttcatccatgttgttgtatattgcagtttccttctttgtaaaggctgaatagtattccatcgtatgtatataccactttaaaatttttttcttggaggttaatatttgtacatatttatggggtacatgtgatattttgttacatgcatagaatgtgtaatgatcaggtcagggaatttaggatatccatcacctcgagtatttatcatttctatgtcttagggacatttcaagtcctctcttctagctattttgaaatatataatgcattgttgttaaccatagtcaccctactgtgctatcaaacattagagctgattccatctaactgtatgtttgtacccattacccaaccactcttcatctccccacccccacccccaacacacacacacacacacacacacacattgttttatccatttatctgctgatggacatttgggttgtttccgtgtcttggcttattgtgaatagagctgcaatgaacatgagagtgctaatatctcttcaaaatcctgatttcagctcttttggataaatactcagaagcgggattgctggatcatatggcagctctatttttaagtttttgaggaccctccattttgttttccacagcagatgcaccattttgcatttctaccaacagtgtacaagggttctaatttctctccatccttaccagtttgtcttttgttttttttgctcacagccattctaacaggtatgaggtgatatctcattgtggctttaattaatttgcatttccctgatgattaatgacattgagcatcttttcatatacctgctggccattttccatgtcttctttggagaaaggtctattccaattcttagactagttttaaattgagttattaggttttttgccattgagttttaggagttccttatatattttggacattaactctttatcagatgtatggtttgcaaatattttctcctgttccatactttgtctttctctctgctgattatttcctttgctgtgcagaagcattttagtttgatgcaatcctacttgtctatttttgcttttgttgcctgtgcttttggagtcatatccaaaaaaaaaaaagtgtccagaccaacgtcaagatgctttttctttatgttttcttctagtagttttacagtttcaggtcttatatttaagtcttcaatccattttgagttgatttttgtatatggtatgaaataagagtataatttcttcttcgtgtggatatccagtcttcccaagaccgtttattgaagagactgtcttttccccattgtgtgttcttggcacctttgttgaagatcagtcgactgtaaatgtgtggatttatttttcgactctctattttgtttcattggtctatatgcctgttttcataccagtaccatactgttttgattgctgtagcttcgggatacattttgaaattaggaagtgtgattgcctcaagctttgttcttcttcactcaagattgctttggctatttgggctcttttatatttccaagtgaatcttagaattgttttctatacttctgtttttaaaatgcccctgggattttgatagggattgcattgaatctgcagattgctttgaatagtgtgaacattttcacaatattaaatcttccaatcaaagatcaggaataacacaaggatccccactcttaccactcctattcaacatagtactggaaatcctagccagaacaattagacaagaaaaggaaataaaaagcatccaaatctgaaaggaagacataaaattgtctctgtttgtagatgacatgatcttatatatagaaaatcctaaagactccacacacacacacacacacacacacacacacacacacaactgctagaactaataaatgaattcagtaaatttgcaaaaaacataatcaacatacaaaaatcctttctatttctgtgcactatctgaagaggaaattaggaaaacaatcttacaattgcatccaaaagaaatacttaggaatagagtcaaccaaagaagtaaaaaacttgtacactgaaaactataacatattattttaagacatgaaaaaagacacaaacaaatggaaaaacatcccatgagcattttataatagcattctaaggacctctttctcctgcccaggtcctcagcctaactgtgactatgagggctgcacacacaggaggggtgcaattattgtttatggcctgagcaaagggttgtcatctccccatcagctggtatctctgagccaacatgccaggctgtgggtctggcttgtctagagccttcattccctgaccctacaatgctctccacctcctccgcctctccgtgcctctgtgatcccgtggtgttgttgtgaggctcttctaggttatcattgaatgcctctctctgagccccttacttaaagtcctttgttgaaaatttctctggcaggggaattttcttttctctcctttttttttttgttttgttttttgattttttctgagacagagtttcactcttgtcgcccaggctggagtgcagtggtgcaacctctgcccactgcaaccttcttcgcctcccgggttcaagcgattcttctgcctcagcctctcaaggagctgggattacagacgtccgccaccacgcccagctaattttttgtatttttggtagagacggggtttcgccatgttggccaggctagtctcaaactcctgacctcaggtgatctggccacctcggcctcccaaagtgctgagattacaggcgtgagccactgcacccagccaagcaggggaattttcaacaaagttccatgcgcctgttttcctccacttcctctcatcctctctctcccctgaacatcccacctttcttctctccatccaatccccccagctcatccctacccataattccaaccctcctgtctctttggagtccagcagccatagccagaggtcaggagtggagtaaaggaggaaggcagggcgctttctgccaggaatctcccatctctctgtacccacctcctgatccccaccaacctctccctctggttgccccctggctcttctcccctccaggccccagaaatcccatctgcccctccctgccctttccaagggaagggcagggagagggcagatgcctctgaggggtgtctctgaggggtgcccccaagggacacaactggctgcgctcctagaggaggtgggcaggcacaggccagggaggagaacacagaggccagcaagtcaggcttctcaggaaatgaaattgctctgtgcaacaatgagagagccactttttaaactttttgcgtgagtgtgcattcaattgctcacattgttttggctccaggggaaatctgacctcggaaaaggctgagatgaagcgggtgtgggtggagagcctctgctatttcacagagtcaagcaacacattcttcagaggcacctttccaggcggaccattcctcctttcccaagagcagggcattcagctacccagcagaggccagggcaggacccactttggccagaagtgaccaagatagtctgttccccaggggtaacaatgaactctgatggggagcagagatttgctggctggatccatggggaattatcttcagccctgcaacttgagaagcttttactacattacaaactctcagaccccttcttcaaccaattaaaccaaacttcctgaaaatggggtttgctcggcagggatatgtaagctttccaaatgattctaatgtccggccaaggttaaggaacatagtctcagcatcctaggtgcattcagtgagcatccactgaccagccaaaaacccttgggtgaggggcatagccttaggagccagagagacctgagtttgaatcccagctgtgccacttactagccgtgggactttaacctcattcttccgtcttttgaaacctcgattttcttatctgtagcataggaatgagaataatactcatcctgtggctttgttttcaggcttaaaataagcgaggtgtttctgtgaagcaagtggcatatgacagccttgcagggaactgtcagtttgtgtgttgctgttgaatacaaaccgtgttccaggcatggctcaagagaaaaaaaatcgcaacacagtcagccccagaaagtgaggtccattctcccaacggggcatccaaggcctccataagcaaacacaacccctttctccagccaaactgctccacttgtatttccataggtggccttgcattcctcccaccatgagaacaatctttctcctcttcttgcctggctcttgcccaccttcagggccgggctcacttcccaccgcctcctcaccctgcctggattcattcctcttacaacatcctatagaactaatgtccacccggggctgtcaacgtctgtctccagatatgctctttgccaggtggctgtattaatgccttgtgaccctttcttggttgcttttaaatcatttcagtctttcgttgctacctggggacaggctaggtctcatctgtcatggaaccccggctgcatgttgctcggagtctgtgctcattcaacaagcaatgatttagtttgagacaatgcttcttattgaactgcgaagtttcctagtagtaccagaaggagggatataagttgtgatccttcagcgaagagcttgcaatcctcctgaaattaagcagccatgaacacttatgatggattgtaagctggatgaatgtggggaaatggaatggggaaggaggtggggagccgccggggacaaagggcaggggagctggggcttaagggaaagtggattgtggacaggcatgggggaaatggggaaagcctccaggaaggagcctttgagccaaggcgtgggggccagaataagcatggcccatctgggtggtaaagagagggcccgatgagcgagccgtggccagctccggctctcaccagaggtgttctagtgaatgcaggatgactccaagaaccttggaaaggttttaagccagaaagcaacaccatggaaggaacaaaggagcattcctttattcattcaacaaacaatgagaaaaatgctacttccttattaaactggaaagtctcctggacacattgcttgctagaaatgtgctgagataacaaagtcaactaaatctggagcagtctctagccagaggagcccacgggtaactcagtgcccggaggagtgcagtgctccaaataaagcgtgggcaggagagggaaggtgggagcccagatggaggaagaggcgaggaggcaggagagccacctcaaagggcatcccggcagagagcaactccccagctcctgattgcctttaaatttgttctgactgtaacggtcaaacaaaaagacttagcaggaagtgaagggctagaatgcagcttgaaaaatcaggagaacctttctgcatgaacagtttattccagccctaatcttaggcacagaccccgcctggaatgttcctctgagaatgtagccttcctagggccaggtacccagcccctgggcactggcttagcatcggagtccctgcagggccagcagctgctgctatgaataccccagcttaagcgaccattcctgtaacctccgccgaaataacttcccacccgctttgtcccctccagagctttcgttcccctcttccgctcagcacacacagtgaagttaactcagcggggtgacgccgacctacccagacccccacgccccaaacatacacacataaacacacggaagcggccccatctgaagctgcctggatccttgacctcctcaagatagaactggagtctcccacccaccccacctccactcccgaccctctccccagcccccaccttttgactgttctgcttccttagccagactctgcaaactgaaatgtgaaatttgaagccagtgttccccttagcaaccatggtaacacaggatctgatagagagcctagagttataaaaataccagcttccaccagacactggtttccaaagggaaaccagtctccaagccagaaccgtttttaaacagtcttaaaactcaagagatttctaaaccaatctcaacatggctcaggaggacatctctttaatcctgttttggaaggtggtgtgggtgcaagctttgggtattttctctgaaatacagagattcagaatgcatgtgctcacgggggaattaactagccttatgaagggtatatagcagggagcagtttttcctaataaacatcaactatttggcattttttcatagattgagctgccctgctgacccccagtgaaatcttccttccagttccctcccggggagtcctcagctccatccatcctcctaattagggagagagaatgatttcgcctatctccccttgcttgaaaacaatttaaattcacaaaaccattttccagccggaattctactttaaggcttaggtagggaggtaagagatggtgatgtcaaaacttttctgctcaggaccaacaagaaaagtcctacatccctgtccccagccctttctctccccacagacgcaccctcgggcatgggcccagcacgagctataaatccctgttctctgcgttccctgcagagggcacaagcctggcgagtgggggcagtgagggcagtagggggactctccccaggggaggggcaccttcccagcccccagccccgccttcgcagccctggacggcttgccctcccatctccttcccccgcctgctcctcctcctccctcttatctcctggggccatgccttgtaattttgaaaaatcttctgactgggtaattaatgtctgaacttcaagaggcccctgctatctgcagagctgagctgaaggtgggaggggaccggcagctgctgaaggcttggaggagggagggggtgcagattattttttctgagctgtttaatggacgggactggggaggatagaatcgtaccttgccagagttgtgggtacaagatgtatatgtacacaggcacaagcatccgtctagatttttaaatcctttggggtaatcctttggggttaaaatcacacagtaggatgccctcctgctcacacaccctcaccgtcccttagcagtttcccagcaggtggatggcagcaaacactaggggagccaggctgggggactttctgagtgcaggtctggttgggaggactggttgggagggagggacagtgacttacacatttcagagatcataaaccgggcactgggggtgcaaaaaatggccatcagttactccaggtaactcagaagtcaaaatataagcctgcctgtttcccaccttaagggaggatccaggcaactctgcagacgtctgcagtgcccccgacctccgtgcttcccagagtgggcccccgccttgcccagcctccgtgctccagcacaggtgccctccatctagcagttggggtgccgagtgctggacccactgctaggccctgggcataagcacgctggggtccctgtcctcacagagctgctgtctcctggggagaggaggagcaaacggtgccctgcactaagagccgagggtgaataaagcacacacagctctccaggacccctgtggatctttctccaaccgactccagctctcaggacctgtagctcaaattagcattgatgatatccacctgctgccattcttgccttcagatgtgaatgatgtttagggaactaacttttctcctcccttctgtccacctcaagaccaagccaggctccagctccttcttgatggctctgctctcattgccgccagcactgaactgtaggtcagagtgtgggcggggccaggccttttgagaaagaacctccaggatcagccttctcttgtagccaggaagaggaggggaatgctaggggaagaaggtgggtttcggaggcagacagtcttctgcagcttaccctctctggcccttgggtagatgtgttaattatttttgtttgtttgtttgtgttttgagacagtgtctcgctctgtcacccaggctggagtgcagtgatgtgatcttggctcactacaacctccgcctgccagagtcaaggattctcctgcctcagcctcctgagtagccgggattacaggcgtgtgccaccacacccagctaattttagtatttttagtagagacggggtttcactatgttggccaggctgatctcaaactcctgacctcaggtgatccgcccaccttggcctcccaaggtgctgggattacaggctacaggcgtgaaccaccgcgcccggccagatttgttgattataaattgacttcctcccttccctgtagctcactgtctgagaggtacaccacccccaaaaaacaaagacatgaaataaaaggatgggttcacagcatattttatattgtataaactgaagtgctgcttactgggaaaaaatgtggaagaacacagtagaataaggctcaggaccttggttcactctctgggagaaggcccttcttctaggtgcctgtccagggctctgctcagaagtcagtttctcagaccccccccgaccacgccccagcctgtccccccaccactgtccccagcctgactgccttctcttcattgccctactagtgcctggcttggagttttctttgttaatcgcttattttctgtctctcaactagcatggaaactctctcaaggcagggaacgtgtctattcacagctgtatccctgtgcctagaatagtgcctggtatatagcaggtcctcagtagatacttattgactgaattaaggaagtagagtgcctagactgagcaaagccagagacaatagtcagcccttctagaattcatctggaatgatttctcagtggagataaatccagaacccttgaaggggcaatgtgagtgagcagagtggggctggctggtagtggtccctggagatgagctcagaacgggaaagggaagagaaacaccccccatcaccccagcaagcaagcccaaaaggggcatttgtgcccacactgtgagtgaaccagtgcaaacagtgctctcagcctgcgaagctgcctctgttctgtccctgcctttggttaagtggccttttctcaacaaccctccaccgagcttcatatgagattcagtctgtccaaagtcagaatcccacaaaccacaatctttaggagaagtcaggaggagcttctagcaaagctccctggaccaagagcccatggggaagggattgttgtgggggcctgggcacctgctgtacactgtgacagcgctcagcagggccctcctcactgcccctcccatgaggaacggaggaagttaggagtatgtgcagggggcacgaagggtgggagaatggagtgggtgggaaaggacacccacagtcacagaccttgaagatgacggaaaccttgacaattacagcagaattcacctatggagcaacatgcccagtaacaatataacgtgagccacgtgtaattttacatggcctagtagccacattttaaaaaactgaaaagggaacaggtgaaattaattttatgctgtctaatatatccaaataatcaccattttaacgtgtaatcaatattaaaaagtaccaatgagatattttttacgttcttctcttttggtacgaagtctttgaaatccagtctgtagtttacactgaaagcagctctcaatttggactcaggcacatttgaagtgcccaagaccacatgtggcctgtggctattacgctggaccaggcggtctggaggcagcttctggaatcctcaggcttttggagcagttctggacccctaaagtaactggattcccaaagtctcaaaagtacttttcatagcctctcatagcaccaggcagcaaaggggcaccatgaatactaaaacctcaagctcacagccagtgtgcgtgtgggggctgcctggctggagagctccctgcagggtctggaaaacgtggtccttcttttttttttttttttaagacagggtctccctttgtcacctaggctggaatgcagtggcacaatcaggactcactgcagcctcaacctcccaggctcaaacaatcatcccacctcagccccccaagtagttgggactccaggtgtgcaccaccacccccggctaattttttgtatttttagtagagacggggtttgccatgtggcccaggctggtctcaaactcctgggctcaagcaatcccgcctcagcctcccaaagtgctaaagagggggaaaaggtaggaaagaagaaacacatagaaagggaagagaagggctgtggcaggggtggccagttgcatgacagggataagagaatccacggatagggacacagtgctgggcagggctgggcagctgccaccctctcctcacagcagctcgacagaaatcgtggccgagtgtgtggaaggcacaattagctcattcttgcattgccccttgattacacaggactaccatttctgtaattaagaccttctcccttactcagaagtattgaaacatgaaagtatttgctgaatctggtttcccagggttaaaagccagacttaggaaacgcaaacacacttgtggaaatgcaaacacacattcagtaattaattatcctttaattaaggccaaaaccctgctgaaaacaattagctctagaaattgaacagtaggtacagctccactttttgctgattgttctttcctgatagccaggaagtgctgagtctggggggcggaggtggtagggaatgaattagtctgccgcttttggtctggactggaccaagctctactttttttggaaatgttagtcagaggagagtttgaggtgtggggaagggcaaagaggatgtggtttgggcaaggggaggcgagaggctgccccaggcttggatgcatgccatgggaagtctcagaagctcctgctggccacacagaggtggcttgcctggctggagtggagggcgtgggccagggattagctgactggaaagcaattagatgaggtgcggctggctgggaaaatacctggaatcccagggccagagttgagacttgcttggctaacgctgcaggcgggaggcctcgtggggcctggggagtggaagtgcccaccagtgagggtgggagggtagccgtgtgggctgcgagtcttggatgcctcttgctgatgcggagaagtggatgagtacagattgtgtgggctcggaggtcctgcagccctctgggaaagatgccctctttcccatttcctctctctaaatgcccccctgcccccgccgccctccacctctcctcagactccttggacgttcctaaagcctgcctagtcccatcagatcacctcacccctttcctaggtaggaagatgtaggtgcacagtgtcccccttccggggactttcacattttgaaaggaggggtggggagagaaaaatgtgtgccccaaaggaacaaaaagggtgcttgggatttgggaggggtagggaaggtcactggcgccaccaaactctccccagaaaacacctgcatgcttaaaagcttacctagaacccccgaagcctggcctctggatggggggcttcccaggtaagagcccctgctctagaagtggaatgttaggttttcatacaggcaagagggaaggtctttattggtcagaggggccttccagatcaccctcaaagcaactgtgcaaaagattccaaatgttggcccagcgcagagcaggactctctcagattccaaaagcccctgacagctcattttttccccagaagggaccccagctcttgcacaaaccccttctctccccttccccctcctttcccctcccctcccctcccgttctcttcctttcccttctctctgtagatgagggtcggcaaatgtctggtatgaagggccagatagtaaatattttaggctctgcaggccaagaggcaaagccgagtttaaccacatccctgcgaggtgtagggcgtgagcagcagcatgtaaccaggagagcaagcgcctccactctgtcttcatagcggaaaaagcagccgtagacgatatgcaaatgactgagagtgactgtgtgccaacgaaaccttatttatggacactgagatttgaatttcatataatttgtatatgtcacaaaatattctttgatttttttccccaactactgaaaaatggaaaaaactattcttagctcatgggccataaaaagcaggccatggccagatttggccggtggactatagttcgcccctccctgatcccgctgtgtggttctcaagtgggaaacgctcctctcctccagatggtttcaatgcacattaaagtttgagagccactgtcataaaggagaatttgcagtttcccaggtgatgctgatgccgtcattagggggatcccacactgaatatgcccaatctagtctgaccttcaccctattttacagatggcaaaactgaggcccagaggcaacgtacctctatcatatgagcccagggaaaggcttctttgtctcaggatgcagagctgggtggttttctatctctagccgccttcagcgatctgccctgccagctcacactgcccaaggctctagccgagatacaggaaatgtggatgtgtcccccggagcccgagagcagcagggctgcagtgagtcatttcccgtgagtggagctggcatgcgctgagccttcctcgtgctgtcagttcgctcccttctgaccactccaacctgcgctttagaggaactccctgccagcttccgggaagcgaaaagcaccctctgtgagaagggaaaaaggaaagaaccaaggtttgcgtgtcagacttgcgtgatttcaaatcccatgttcgtggtactgcctgggacttgaaacaaattccttcacttccttgagcctcagtttccatcagtaaaatgagaaaacagcccctgcctctgcggggttcccagaagacctggagattaaatctgtccagtgtcaggcacacggcagggaatttttatggtgtctttattggccatcctggcattatgcattagccacaagggtacccagcctcaacctcaaaagccacagaaaaaggccacctgatcctccagacaacatgtgtggccatggctgtgctgatggtcttacagaggcagtcactgtcctacactcctgagacattgccattgacgatttaggttgtgctgtgtaaggctcatgtacttgggtcccttggtggccttcagggtctgagaaccctgaaattgtatgcagacatctgtgaacctgtgcagaggtgcatttttctgggagaggtgcagatttttcatcgagatcctcaaagggatccatgctcccaagaaagctaaggatcccacatctataagcacagtgcagaagggagccccagactttcaaggcatattcctggatttgagaatcagctccctgacccccatgagtggccttgggcacactggagatcatctgatctcccccctctggcgtggtccataaagcagtgatgggactatgtgaggatcaagtaggacatgtcaggccaggtgtggagaggggactgtgtgggagctgtcggtcatggtcccttcccaccaagccccccacctgccctcacccctgacttggctgccccctactcaacctttgggtttcctctgcagagaagcctgccctgatcacctcatccatccaaagggggctccctcccagctccctgtttgcatttgtcattctacccctctgccccccactgtaggtggcctggggacaggcaccgggctgtttggtccccatggccccaggccctctagcccatgaacatttgctgcaggaaggcacaaatgcatacccccgccctaggagccactgccttggagcccacccacctccaggccccacctccctcctcccccagcagctgcttctctaaagaggcagctcccactgtgctctggagcattcaagatcccagcaacaaagtcagagttaaaaagtatattctgtgcttctcctggagctgacgtggtcccatcaggtgccccctcttgagcacagccagcagcccccagagaggccctgggctgcccttcagggtccccatgctcagcctggtctttttcaaggcctgattctaagggctgtgtgggccctgcttgctctgcctggaggacagtggggtcaccactggcatctaggggacccctccaccaccctgctgccccctaagatgcgtatggggcaggccctccagcttctcacacctcaactccaaaggcctgggcgattatgaggcaccagtgagtgagatccccaaccaaccccatcacttcagccctccaggtcccaacatcccaccaggtccccctggactgccagcacctgccattcccctagaggggcaaggaagcagggtgggaagccccaggagactgccgttggtcatgcccaggtaaggattagccaggccttcctcctccactcctctcctctttgcctggtgcaggaacaaccagctaggagtcaggaaatctgagttctggtgctggctctgctgccacccaagctgtgcctctggtttcctcctgggcaccgcacatagatgccatctgtgagtgtgtcccctgcttagtccacatcacctgccatcagcctgctgagagggcgccggggcccagtgggacaccctgggaaattgtcagctactagtcctgcatccctgcccacatttgggctgtttgtcccttcccatcgcataaggagcggggaagggcaggaaactgaggcagccagggtttgacagcaaagcctgcactgcctggcctgggggcaaaggagtgaggtccagaggttacgagctgccaaggactggggacctcatctttctcctcctggctcccatccaatgcccaggggctggggggtctcctttcccggggcctcccatacacacattggtaaagggaggaacaacagcctcatggtctcggatccaaatcctcatccctgtgctcacgagagcccctccctagagcaagggagcactggtgcctgcctcacagggtgggggcgagaagggggctgtctaaggcccatcaagcatttagcaggggcctggcacacatccccactcagaggacaccgagaccactgttcatgtcacatccggggttcaaattctcagtgctgcaggaactcagaggaggaggagtggcctgggagctggggagggctgaggtctgggctgggggaagcacctgaaggcaggggtggaagctatgggcctaggggcacctgagcctgggtgagcccagcccaaactgaacaaaggcgattagagctaagaagagggtctcagtcatttatggagcctctgccactcccatccacctgaagagacatttttctcagtggtgcccactctgactgcaccagaaacacccagagatcttactatacagattcctaggcccccacagccctacatagccctaaaatcaaagagtgagggctggatctgtttctctcctaggtggatccagtacaaacacagggctgggaactacccactggatgcatccctctccctgctcccagatgccctgagcccctgccccccaccaacctgtcccagcagccctgggcaactgggtgactgcgaggctaagaatcccccacacccacaccctccctggtgggaagggagtggggctgtctctggaactctgatttggttttgctgtccaatgccagaacgggggcacactgaggaagagagacttttaaaaacaaagtccgtcttccctggggttttattttaccttggaaaatagaagaactgatttttttttttctactttcccccaaacttgctccctatcagtgtccctaaagtaggaagagttctcacttctccaagtgtgtagtcttggcattaattaaaatccagaaatgacagcaacaaagcacctgctttttcttcctgcttttctcccaacaccccggcacatcaacagcccgtcagcttgtgggtagactcacataggagctggagcctacactgaactttcatcccaggcgaaatgcctatcagaaggcaggtgcgctgccttcccaagccagtgccctcctagagttgagcgtgctgggctgcccacgcctcacgtgagcctctcggtgcagtggccgcctggaagatgtctcacctgggtccttgcacaggcagatactggagaaaatctgaggaaatatatagattgatttttgtccgcccccctgaaacgagtcccctttatagtcacacttcatagaaagcacaacacagacagcatgtctgtgcttgaggctgtggctgtgcacacttgggtgggctcaaagtatatgcattactgcacaacctttgtctccctcggggccaacacagagtttagtgtaggagccttcacttaggcactgtgttcacctttacagccttctccaacacttcatttatttggtggccccttaaccagaagcatatggagaagttgagggatttgccaagggacaggcagcaatagtgatttgccagggcaggccctgaagcctgtgttggtcacaggcagattcaagggcagcagcagcccccaaactctagatctgcatctcaggcccaggcacatctccctgacacctccccgggcctgcccaccggcccctcaatctctaagtgtcctagtggaacctgtcttctgctccccaagcctgcacctcctcccggagaaggacctccaggctgtgccggctacagccccgaggccatccctgactcaccaccaaccgccaccctgctgccagttcccagggtctgtgagcagcagctcttgcagattttcttgaatctggccaccacttttctgcctctccacggctcggctaggccactgtttcctttcccctgaattaccccaccagccctctcactggctcacccctcctgttctcagtctcaccctgccaccctctctctgagcactcctgactcacttttctccctgcctgtggtgtccttccctctcttcctctcctcaccccactctcctggctgtagcttcaaaggtttcttcccaggaagctgtccctgagcctcctctcctgacccaggtgagaacagttcttcccgtcactgaccccacagcacactctacactgtgccacttgcagcccactcagttctaagagccaccactgaccgagctcactgtgtgccagatactatcctaaacaccccacatcctcttctttaatccttgcaactacccttggcgggaggtaatattagtatcaccactttacaggtaaggaaactgagacacagaggggttgcctgtattgcacaacatgactggtggggcggctgaatcaggattagaatccaggcagtctcactttacagccttagttccaaatgctgatctgcttatgcaacatctgtcttccctcctagactcataaatctataaggccaggatctgtgcctccttgttgaatgagtgaatgaatgaaaagttgttactacccccttcagacaccctggagaagttggacttgttgtgctccaaggctttatgtcactggggggctgcatcccagggaacagaggcccttccgaatggcctcaccccagccagcagaaagccatgctttctttcaaatccaatcttcaggtcttccgagaggcccaggtggactcaagtgcctgtgtgagcagtgtgaagaaaagctagtctaggtagatgctagactagacctagaactaggtagaagcaacagttgctcccaggctgggagtggtgagtcttctggctacggaggtcagagaagatcagggaaggcttcctggatgaggctcttaccattgttcttaagggatctggtcaatggagccaagatcagaaaaggcatgctcagccaagagaattgtcagcaaaacccagaggcagataagggcaggatgcatccttagacctgtgaacagacgagtttgggtggattggaggtctgtgaagggggcaaggtgggaagactgtagggcccagagcagaagtggcccagcgagccgcctgaatgccaggctaagccctcatccccatgcagcctggtcagttgaacacagtgagaatgcacaggtgataacagaatattgactcacatgctcattcatccaaaaagatcatctcgacttagaaaaagagttgccccattattaaaatttatattctgctaagggtaaggctctaaagccaaacaaacttccaggtgccaattaacttctcttatctccgagtctcttagacttggcaaagagtacttaccaaatccctactgacaccctgggcagccccaggcccttttctcagcccaggcctgtctgctcctccaatgggtggctgctcctctgagcacaatgctaattatgcccttagcacagcccgattcttctctgaacagtaacagagcttaattgtctccggcccagctgtccctacccagttggtccttggttactgcattctgcccaaacccactgcagaaccagctgcactccctcacccaaaggatagccctccaacccagctcctgccacaaggcttcactccacccccacccccacccccaccccagaagatgggcacctctgtctggaaaccaggctactacaagtgttgatccttcttcaatacagcatgccaagattatcatgcaaaaaagaacatggtttaagcaaaggtttcttcaaaattccgtgcttggtggcagaggagtgggccagtgtgtcccttttctaagtcctccaatgacccttgctcgttatttatgccctccctgactcatgctctgtaaagtctgaggttggtaaaagccccctacatttaagagggcacctggttaatgtaggcatcccataaacaatcttctaagaagcttcttcccagtctcagggaactgtaggttggcatagccttgcagataatcttgtgcccagttggtgagcaagcaggggccagtggctggagcggcccctgggctctgggcatggggaggccctccttctgagctgatgggtggcctctgcagccgggccctccctgagcttccctctgggacagcagagaactcaacctctctgcctagggcagcgccctcgtggccccggctcagcccagctcctctagggaattgagtggctggactgtggtttagtcgcccccagggaagcttacccagaggaggaaaggactgtttcgcaagccaggcccggcgttctgagctggcctgtccgcccctggcatatggctgggcctgttaggaaatcaaggagacgctctgtctctttccagcaggcgccacttctgtcttgccactgctttgctcgattcaagacgctggctcgggggccaggctggtgggcaggcaggcgggcaggcgggcaggcccctctcccaccagcccggtgcctgggaagcgctcactgtctcctcagccggtgttatcccaggggtcccgcacctggctgataaggccaggcggctatcagtggccatctcgggtgggagggcagggtggctctcagggaaggattccagactgtttccttctggggctgagctccaacgcccttatctcctttcctgccaggcagggactcctcagcgctcacacacaaaagagaactccacccaagacgcacagcccctacctactggaaggtggaggaggctttgcctccggtttcattaaatctacctggttctcaatcgggggcagttaagtgtgcactcagctaatatcaatgtatttggtcctgccagggggtgggagggttggagagacggggacgttcaagtaatggagctgccttggtggctgttttcgaagctcctggacttgtcagtcaactgaaacgtctcttggaagagaaacaaccaggggatgggccaatgccaattacaagattcaggggctgcggggatggggaggtcaggcctcatgggactgagtagaacgagggtggtggggcctgagtgtgaaaaaccaggcctcgctcagccccgctcttggctgccttgaagcctgtgaggcaggaggcctggtgagtattattcccgtttcatagaacgcaggcctgtgggtgggagtgctagagggaatacgggaatatattatagaagatgggtcaacggaatccttgagaggtcagccgagcgcccattcctgttagcgcggaagggagagccctggcctcacagtgttcccaggattaatgttccgcctcagaagagcagcctacccccaagactctcagacttactgctgggcaatgctttccagaggccagggctggcctaggtgaccccacagggccttgttccagcccagcagtcgctgattctacaggcaagttactatgggaactataactttgaatttcctggctctggggctgtgaaaatcacaacctgaaccttccgttgatgtgggtttctcgattaatttcctgtttgattgtttactttagagagcggaaaatgcctttgcaggcagctagctccctccacggagacacttatcacaccctgcccccacagccagcaaggtcaagtccaggcctcaggtgggtggaggtaggggccagaagcaggggcagggactgggggaaggggctggagctgggggcagggaggaggctcagccagaagcagatggcagcctgagccccctgccctacccttctgcttgcccggggtcccagcctggtggatgtcggggctgtggagggacctgtgatttcagagacctgtgagcctttgaggggagcctcccacccaccccaagccccaggactggcccctggctgcccaaactatcccctgtctcaaggagctctgttgtgcagagtcagacatacagtgcagtccttcctggagagggtggcctcagtggggagggtcagagatttccccctaggccaggcactgctgactgggctgcccagtgcggggctgggcgtaactgctcttctacccttctctcctccatctgccctccccagggccctgcgctccagcagggagctgtgcccagtgttcccagtgaccataactccatcctgttccctgcggagtggggagggcttgcaggctcaggtgccgcctgcgagccaggagttctgatctcctgtgatgataaccacccatctctaggccatgggacactcggtagcctctcgagccctcctccccaccccagctacccagcccctagatggccctgaggccccatttataatgggggccctgaggcacggggaagggaaatggaataggccagagggctgtggactacccaggggatctgggaggcctgggaaaaactcccaacctcccagcacccctcccttatctaggtgaccgtatattatccacatcagggcagtttggagagtggaaaggatgcttttactaatgactttgagatgacaggtgaaaactggaactattccaggcaaacgagatgtgccatcaccccacctttggccggcctctccccatcagcctatttatgtgggcactcactggggagcaggagtgaagctatttttctacctacttgtgtgctcttggagaaatcatttccttccctgtgcctcagtttctgtagctgtgacatgaagagcgttgcagtggtgcctaactcagatcatctggtagaaagatcaaatggatctttaaaaacacacagagcacatagaacaaccactcaaaatatgtaagccaggtgagcatgaggattccgaaggtgctgttcaccctcagaggccccctctcaaaaggggaacctcagagctgccttaggcatttcctgttcactcctcaggagggatcttggactgggggcagtgagcacagaagaagcttccagaagggatggggagggcctaaaggggaagctgggaggcactggctgcaggcacagctgcttccctggagtctcaaacccaccccagggtcctggggattcctggctgcaggcactgtgaacagaactagcccctgtctaggccactagctggagcttggtccacaggagaagccgctggagttgtagccctgccttctggatccaatgtctccagaagaatttggtgtctaccctgagccccaaattatatttccagcccccgggccagctgtgggatgaagcatcccccatgtgacatccactgtcgctactttgtacggggtggtttgcaagcccggcaggaaggaggctaattattccctctggggcgcctggtccgcagctagggtgcccgcccgccttagttaggagggctggcagccagaccacagggcacaagcttggactgaaggccaggtcagaaccacaaatttcctgacatctgaccataaccaccataccaaggctccatgttagactggtggaaaagtggcatgggggcccattcccctctgctgaaggtgtctgcactgtgggcaggcaagagcgattaacataaaacagcactaattttgtagctttggtgccaggctaggcaacattagcatctacacaagcacctatatccatggccacaccagcccttcctcccacttcagagggcgacactactcttctttaaggcagatctatgtacttgatcctttcctcctttctgattatcctcttctcctgcactctggcacctcacctctacctttaaactggctcaagactctcctactttaaccacaccagattcccagaccattctaggtgaccctgtgccagtgtctttcccctagcatcctccccttttcttcttccataggcaagttccaaaaacaaagaaaagagggaaaggaaggaagagaagaagggggttggggttgggggtgggggagagagagagagaagaaagtacagaaattcattccaaagaaaaagaaagaaatggtgtgctctttctgtctgcacttctggacctccttcacactctccaaccctgcggggcccagcccaggcttccactgccccagtagcagcactgaagtcatcatggcaaaggtcacccatgctcttctaatcaccaaatccaggggaccttggtcattgttcgttttacttgacctctctgagctttgacactggtgaccttgtacttcttggaactcttggccctcatgacgccatttcctcctgttctgcttaactctctgaccacccttttcttccttctttggggattcctcttcctcctctctcaccctttaggcattgctgtgttcaggttgggagcccctgccgtcttctcttctcattccatgtgttctccaggtcacctcactcacaccaacggcttgactaatccctgggtgctgatgatcccagattaccattctcccattagtcatcttccctggtcatccccaaggaccctggactcagtatttctaacactgaactcattcactttccctaaaaccacctccacctgccttcccaatattgttgatggcatcatcacttacgcagttgaccaaaccccaaacctgggggctggccatcttctacctcatccttttcctcactctcacttctgcctcttaacatattctgcctcttaaatatcctcctcccttcctgccagccttaattcaagccaccccaattttgcacagcaaccttctaacggtccccctgcctccagtccaaacaccaccctacctacatctccatgctatgcaagataggatctttctaaactacaggtattactatgctactctccagtttaaaatctttcagtggctctccagtcccttgggataaaatccaaactcagtaccatggcatctagagcccttaaatatgtggcctttgccttctttataagcacattccacccccagcaccatatattttaggcatcttgaaatacttattcatcattgtactctgctagtgcacattttttgcttttttacatctttctcatgccatatgcctggagttctccaccaccgctattccttcttatgctgcaatgccatatacctagcaagtctcttgctttccccctactagactataaattataagtcttattgttcctcttgttatccctgtacttacgtagcatttaacacaccatagatatttcataaatgttgccgagtggatggatggatggatagatgagtagatgggtagatagatggatgaaaggatagatggatggatggatggatggatggatggatggatggatggataggtgaatagacagatgaatgaaaggatggatgggtaggtgggtgggtgggtggatgaatggatggatggatggatgagtaggtgagtagatagatggatgaaagaatggatgggtgggtggatggatggatggatgaataggtgagtagatagatggatgaaaggatggatagatgggcggatggatggatggatggatggatgagtaggtgagtagatggatgaaaggatgaatggatggatggatggatagatacatggatgaaaggatggatggatggatagatagatgaatgaaagaatggatgggtggatggatggatggatggatgagtaggcaagtagacagatggataaaagggtggatgagtggatggagggataggtagtggccaatacagacaaagaataggtaaaatcagttcaattttgtgaaggctcaggttgacctgtcaccagtcaacacaattaaaaattatgagctccagccggacatggtggctcacacctgtaataccagcactttgggaggctgaggcaggcaaatcacgaggtcaagagatggagaccatcccggccaacatggtgaaaccccatctctactaaaaatacaaaaattagctggtcgtggtggtgcgtgcctgtagtcccagctcctcaggaggctgaggcaggagaatcgcttgaacccgggaagcagaggttgcagtgagccgagatcacgctactgcattccagcctggtgacagagcaagactccgtctcaaaaaaaaaaaaaaaaaaaaattatgagctccaaccagcaaaataagaattagctaatgtgggaaattaatatcattccgtaaaggagagagcacagatccaggactctccagcaccttccatttccacttagacctgctgtctgtctgggttgtgcaagccacttaactactgagcctcagtttctctaccaattaagcagatatgataatacctgtggcctttccctgtctccacaggagtgtcatgagggtaaaaggaatggtgcatacaaagcatgttgagatcttcagggaagatacatgtttataaagatagaaacatcataacaataataacaccttacgtttgaatcaagctttgcacttatcaaagctctttcacatacgttatttcaattgactctccaaacaatcctaggcagatactatccctgttctcaggtgaggaagctgagatgcagagtgattaagtggcatgccaggggctggtcttagtgtgtagcaggtcttctgactccaagcctgatgcccatttttgatgatagcctttcttggatagattatctacttccctgcctccctgaacggagacctagacataattggcccttttcttgatgactcgtcattaccataggcacagtccctgggctgtcctccaggtttggctgtaggtacaggtccaggtcccgcagaggcacagggtggatgggccagctgtcccggagggtactcctgacgtgtaggtggcaaccatcctagagccctgcaggtgtggttcttctgactctgcctcattcttccccctgtcccctttgtctccactgtcagcatgtgtgcccatttctgtggcttcctccgccaccacggcctttacccgtcactatcttttcttctttgtttccctctctcctgccctacaattctttccacaccttcagcttgtccccccacagccctggctcatccaccggcccagccagccaacctcagctcccaggctggctttgttctcccgccaatcacagccctctgcaaacctcccactttggctccctcatggctgcccctgtggccacctccagtcgctaccaaaggaaggaggctcctccaggcaggggctgggctgagctttttctgcagctgcattaggtggcttgggtttgctctcccacagtagaaggctgtgctgtgggtgagctgaggtggtcaaggtgggctggccagcccggcttggatggacactgcacccctcactagcaaggcaagatgttgggattgccagtgctcatccctccctgcacagcgaggctgccccatgagttctcagcaccccctttccctccctgcagggtggcatcccaagctaccagcctggttacatcctgggcatgccttgggcagcctgcctgtgcccgtggcccttcccccagggactccaggagactcccaccaggctgcctttctccctggctgctgtggggcctcccacagccacagcctgactggagcaccttggtttctccctgagggaggatatgatgggcgtgcccacaacaagtctccggcagagacaataggacaggaatgcattcgcttccgaacaaacactgtgtgggctcgcacaattgccttggattcttgtccaagaaacacattttgccgttcgagggcacgggaggcttgcctgccccagcccgcccacatccccgtcagtgccagagactctgatgagtgggctgctcctcccccgaccccagggcctctgacccccaggtagagcaggctggtctccttcatggatgcagctcgtcttccagaggtgacagcagaggagagggacagtcctgcccacacagagggtgcctgctcctaccaatgccttttttttttttttttttttttttgagacagagtcttactctgtcggtcaggcaggagtgcagtcgtgagatctcggctcactgcaacctctgcgacctgggttcaagcgattctcctgcctcagcatcccaagtagctagaattacaggcgtctgccaccatgcctggcaaatttttgtatttttagtagagatggggttttgccatgttgtccaggctggtcttaaactcctggactcaagtgatccacccaccttggcctcccaaagtgctaggattacaggcatgagccaccccgctcagcctgccatttttttaaaaaccattttttattggttaataaatacatacatatacatataacattatgtaaagcttaccattttaaacttttttttttttttttttttttgagacagagtttcactctatcgccaggctggaatgcagtggcacgatctcagctcactgcaacctctgcctcctgggttcaagcaattctcctgcctcagcctcccgagtagctgggactacaggcccgcaccaccacacccagctaatttttgtatttttaatagagacggggtttcaccatgttggccaggttgatcttgatctcttgacatcgtgatccacccgtctcgacctcccaaagtgctgggattacaggcgtgagccaccgtgcccggcccattttaaccatttttaagggtgcacttctttggcattaagcgtattcacactgttgggcaaccatccccaccgtccatctccagaactgtttcaccttccccagctgaaactctgtccccatgaaacactccccatcctccctcttcccagttcctggcacccaccattctgctccctgtctgtatgaatttgactactctagggacctcatagaagtggaatcatacagtgtttgttcttctgtgcctgacttatttcacttagcataatgtcttcggggctcgtccgtgttgtggcatgtgtctcaatggccttcctttttaagactgggtgatattccccttgtatggatttaccacttgtttatttattcatctttcagtgaacacttgggttgttccgcctcttgctattgtcagtaatgctgctgggaacatgagtgtccaagtcactgttcaagatgccgctaatttttgagatctgtgtttgagctaagtgaagctgttgtctcctggcgatcccaaatagaacatacataaatgagagagctagtcggccctctccgtactggcagggattcgtttatccccaaaatgagctgtctcttaggaaatcagagccctgaagaaatgggacataggacaggtcatttaggccaagatagacaagactggaaaggttcttcccttgggatgatacccactaaaggcaagttcagtagggatttctgggcagccattggtcaccctgaagcatggagagcccgggagggcaatggcactgacggggccccagggaggaagcctgtggagttgtgccaagggccccctggaagaggcaggccagacccttgttctgacacagagcagcaggtggggccttcagctgtgtgccccatccaagggaggctgagggagcatcctccaccatcccttcaccccgaagggtctgagaatccactctcaaaagccagcaaccaagcaggtgtgtgtggggaggacaggacatggtctgcagccaccaaggcccttcctgtgctctctgcgttccagcaactgggagggacaagtaagatgagaaactccttccctgacttccttgagaaaacccagcaggccgtttgcaagagggcctctcgcacaatgtggtttttggcttcatgcagactttcccaaacaacccagagaaagataaggttggaagggggggctctagggttgagaacccgcccccagctctgccttagggccctgggcagtctgtcctctgccctgacaggagttgggggagtagggggagcaggggcagtggccccaggagcctgcctgcggggagtttgggcgtgcccagggaagaaggcatgggaaggggaagtcacaaagatacgagaagggaagaaaaagagcagggagactgtggaaccgctctgcaggcccaagcagccccatcacagaaagtggaaggcacgcaggctgtgggctgcagaagagacgaggaggagacccttgattgtcagggcaaagcgctcactgtcaacacccctgggactccgggaggcttccacgcagccctgtcagcgtctccctctctcctcggagggagatgcagccacattgagagcctctagtgcctggcaggccctggctcttctcgaaatttctcatattattacttcacttgtccctaaacctcagaacctggcaggcacaggcaagggaccagagccccctgagaagctagtctcaggacacaccagggccccaggcgcacttccctccccgggagaagcattgactgagcagccccactgtgtcagccagcgacatccgcctgcggctgcttccccagctgccctcccttccttcgcatcagctcccgggttctgcctcttccccacccagggccaccacccactctgtctggagtttcattcccaccagatacttaccttccccctttcctgtgatttctaccagcaatttttattttaaggatttttttttcctgctaagcaccctagggaagcatatgagggaaatttactataagaaagaagttccagcctaggtggggtggttcatgcctataatttacctagcactttggaaggccaaggtgggaggatcacttgagctcaggagttcaaaaccagcctgggcaacatagtgagatctcgtctctagtaaaaaattttttaaaaattagccagacatggtggtgcacccctgctcccagttacttgggaggctgaggctggaagattgcttaagcccagcaggttgaggctatagtgagctatgattgtatcactgcactctgccctgggggacagagtgagaccctgtcttaaaaaaaaaaaaaaaaagttccagcaagaccacacagaattctcctgatgttaatccccattttccctgctgagtaagtgtggctaggcccacctttccctccgatcccagtcccagacagtcacaggaccctcccaggccctgaaccagcccctcgcagttggatgttggaccccatgactcaggtaggcttgctgcaggatgagtcacaccccccacctccaactttttctagaacctgcttactaatctttatcccggcctcttgggtcctctagatgagggagaccgttgcctgtggcccaagaaagtcccccaggcactgactggtggaagcctcccttggctctccttggggatccgcagaccccagtgcgggagaggggtcactgccccagagtagcccacatgggcatactgtaactacttaaccagtccccttgttgggagaggtccaggttactttcaatcttttgctctaaaaatagtatagcaactagtgtacacgtgttgtatggcatgtgtgtggttatatgtgtgggataaattcctagaagtaatattgctgggtcagagggttttggacacttctgttgttgatgattatcaccaaattgccatctatagagtgataccagcttgtatttctacaagcactctatgtttgcagacgcatcgataataattctgtgccatgtcccttctggtgacaggggtatggggaggggtaggtaaccacatccccctcactctcatcttttcaaaggtacgtgcatcagagggccttgcaagcagtctctctgggtgagcattttcctttcctgtcacagactctcagctgggcgagttttctccctgcctcccaaagcatgtttctgagcaaatattttccagtgtgtgccagatgttggggagagcagtggaccgacatcgccctaccctcatggagcttgccttctagagcggggagacgggcaataggcaaacaagtatataatatgtcaggggccgcagaaaagggtgagctgggaggtaggtgggggatggtggctgctcagggaaggcctgtctgccctggggatgtttgggcagagccctgcataggatgagggagtgaggtctgtggatctgcggtggccaagaatttccagcgacaagtatgcagaggcccagagttggaaatatgtgggtgggatgcgagaccccgagggtcctcagtgcctgtcacgtgtgcagcccatactgttccctcccctgggttgaccgttgctctccacctgctcatcatttgagcagtttaaggcccacctctgctcactcatcccaaaacgatttcttttctgtgtatctgctgcaaacccagttctcaggccagttctgaccaagttaccaaggagaatgaggtctggtccctgaaagtggctctggccaatcaagcactcctacggccctggagcctgcaccctagtttggcctgcagccaagcctgccgtgggtcctcagctcctgtggtgaatgctgtagctcctgctgcggggcccctaggctgggtggatggatgcaacgtgacaggagacaggaagaattaaggatgtgcagaatgcagattttgagccagcaacatgaccagtccccagggttggctgggcatgattttgcctctccttcttgactatatcatgcccagattaaaactttggctccagctctccgtgagtaaatgaggatgtgccctcagaatgccatcttttaccctcttctcaccttctacccttccttttaaaaatgcaaaaaagaaatgcataaatcatgttgaccaacagttcatgaatccccactgttgccaggggctttgcttggggttaaagggcagcagagatgaatttggcactgtccctgacttcaagaagccgacagttcaccctggaaaatgtcttaacttgtgtggaatgtgcatgggggggaaagcaggagtgcctgggagtgagaagcagggagggcagggactggggtggtcaggaagggtccgaggaacagctgggaagtgacccagccttaaaggatggagagaggatggagagccccaaagatacaaagtcatttggagtctaaacaccagctatggagtgcggccctttaacctgcatgggaagaagtcatggaaacccatggctttaaccaaagaggggcctgaagtagaaatgatttctccctggccccaagctctcaccttccccatccactctagaggcaaacgtgtgcaggcctgacccgtcttgctctctgcccctgctgctgccctaggccacactgccaccatgcctggccaggtccctcaatgtccacccttccctcctacagcaggcagaatggtccccttaagacataaaccaggccaagcatggtggctcacacctataatctcagtgctttgggaggccaaggcaggaggatcacttgaggccaggagttcaagatcagcctgggcaacatagagagaccctgtctctacaaaaaataaaaaaaaattagcagggcatgatggcctgcacctgtggtcccatctacgcaggaggctgaggacagaggattgctcgagcctaagagtttgaggttacagtgagctgtgatcaagatgtatacaatgtggagtgattcaaccacactcattgacatattcatcacctcacaagtgctgctttgcatcacagtgcttaccgccatctgatagagatgtttattggtttgttttctgcatttccaccgccccggagctgcatttccaccgccctggagcagggcctggtctgtcttgttctctgcagtgaactgtgctggcctggcgcaggcgctcggcaggtacttgtgactttgtctcttttgttttggtagatctgtgctgctttcgaagtgccacctcggcatctctctacagtgtgatcaaggagacctggcatctggaacaggactgtgttgagatcagagagacccagtctgtagtctgattgatctctactgactttgaggttatggaagttgtaggaaggttgttgttatggtttatacagcatgtagtatattttcattcattccacattccactcaatatttgagtacctactagacatagttcaaggatttctgtacatgaaatgtgccaaaatgcttctccataaaagcagtgaatcacctttgcatgaattgagttagatgttggttactgggctcccttgagttgtgggttaggagttaactgtggcctgacctggatccctgtgactaggtgatgctctcgagtttgccagcaacagaaccgtctctgcgtccaacatctcctaagcgggacagtagcgtgggctgtggcatgctaggaagatcactctggccagttgtgtacaagataaattgcaggggaaggaagtggggaccaggatgacgcatcaggacgcgggacagtcctccatgagggaagcaacaaaacctcacctttgagtaaggccagggacctggaaaagtgggactaaaatgtctccaggacgttttaccaggaaaactaccagaacctggtaccttcttggttatggatggtaaggggagagcaaaatgactgaggttttgagctggaggtgacatggagctgctttgaggcaaagatgataaagccatagtgtcatccagaaagtgaagcccaatgagtgtgggaaggttcgtgcagacgagctagatgtggggtccctgagagtcgtgatgatcgacatggcaggaggggacggcattgagaagagcagaagcttgacaataactatttggggaggaaaatattggaggaatgcctgttttaggaactgagagaaaaagcattagccagcaaagagggctgtggtaggagtggtccgtggggcttggtgagcttctcggaagccacgcccagagagggtttcaggcactcggtgtcagcacaccagtgctgctggggcttcaagagagagtgaatcagaaaactgggacatagcaagcattggtgaggctgtagagaaaccagaaccctcatgcattgctagtgagagtgtaaaatgatggagccattgtgggaaaacagtcttgcagctactcaaaaagctgaacatagagttaccacatgacccagaaattctaatcctatgtaatatccaggagaattgaaaacatgcatccaggaaaagcctggtacacgaaggttcatagcagcactattcctaatagctaaaaggtggaaacaacgcaaaagtccattaacagatgaatggataaacaaaatgtgacatatccttacaatggaatattagtcagccacagaaaggaatgagatactggtatatgctacaacatgaatgaaccctgaaaacattaagtgaaagaagtcaatcacaaaaggccacatattgtgtgattctatttctataaaatgtccagcacgggcaactccatagagacatagaatcggggggagttgccagaggctggagtgaggaggaacagggaatggctgctagtgggtatgggtttgtatggggagtgatgaaaatgttcagaacttaaatagtggtgatggttgcacaattctggggatatcctaaaaagcactgcattatatactttaaaatggtggattttgtgttatgtgaatggtatctcaatttaaaagagacagagagattgagagaatgagccaggcaagtcgggggaagcatggactgtagcacggcaggactgagcgctgagcagcccagccatggccctagttaggaaacagttccagcccctgagtaagtccacaggtttgtgggtttgaaagtctacagcactgggccagtggagaagagggctttgactcctggacttcctcctgtggccagggcccaggggtgcctgagtcaatggctgaacctcctcacccatagaggagttaccaattatacgtctctaagctaatttcatttccctgaggacttctgctgaccagttgttaacactggatgatcccagcgcactcactgctgcaggctttctcttcagtggcctcttgaatcacggtgttcagacctggcccaggggctccacatcgcaccatcacactgacctccagctgctctaaccctgtcggagaaatcacggccacccggcgcaactgactttctgctctctgacttttgtgggctctcactctagcctgaaccttggagatgtttgttacaggccgcatcagggctggggctgcaggtcggcgggggctgcagggagctacagggcccagtagccggcatgtctccttcagtggtgctctctgcccctctcttccacagctcttgcaatctcaggatgtgaaggaagatgctgtcctttgctgctctatggaggtaagctttggggcttcgacatccccaacctcaaagccggtgcatctctcatgccttaacagttctaggggcacgagggttgttggaggcatttacaagtccaggggaaggtaggtggatggcttcaggagtgggcatggacttctgcatccagaattatccaccccaagccagagtgaacactgatggtgagagcagctcacccctgactgaagggagagagaagtgattcccagtggcattgcctacttccctgtcccccaaagaccccctgcgccccagctcaggcatgccacacaaatgacttaagaagttcctgattacctctgccctcaaatatttccctttgctttgctaatgcttggcaatgcagtgctggcacagcccacccgaaagcacacctcttgggaggtgccactcctgtccctaagctgtggcccctgctaatggagactcttcctctgggctctccctttagcgcctggctttggcccagtccctgggcagatctctgccctctgcagatggtccagagtcactcagagtgggatgcaggcaggagaggggcttccagacgaggacctgggcctggcagctgtcataagcatactcaggtggcttccgcctggctgcaaaggcctcactgaggagctcagaggccagaagcactgggagccagatggcagtcttgggtctgtgggactcagtttgtttgttggcctccagctgggcaccctacagggggcttgggattaggggggaattagggagaaggagaaagcctggtccttgccctcaggcagcttccagtctggttaggaatagctctcagagagtagatagaataagtgtaagtacagagacatccctgaagagtcaggggagagaggtcaggaagggctcaggggttcaagggaggctttgtgaagaaggcagagactagaaaaatgaatgggacaaggctggggaccgagacggggactgagattctatagagagggcctggggggcactggccaggggtgtgctggtccaggaataggggctccttcccagtgggcttttcaagattatctagggctctcctgacggcctctggctggccttcttccccagtttgtatttctctcccccacttcctgtcacaagcatgagcagaggtcacttctgggggctgggagatgggatcaggatcaggagaaaaggagagcgagagaaacaggaggcatcacccctgctctcaagttccaatggacacatgtaataatgactaagctcattgccagagagacgccccagcaagtgaaaatgaccacagggccccctgatcaccaaggggcacagatcatggagccatttgagggtgcggatgtagtcagggaaggcttcctggaagagggaggctcttgggtaaaagggacaagaggcatgttcctggtgacagctctttcagccctgggcagtaggcaatattcggatccctctggatcctgctggcagattggttggtaaatgtgagctctcactcttggctactccaccttccactctccctgtcctcattccagctgtggcacaggggtctgggcctgtgtgtccttaagacaacccagctatttcctatccctgcccacctaatcagggtggccagtgggccactgtgggacccgaggccatcctaaccccacatctctgtctgcagctgcagagtacaggccggctgctggaggaacagctgcctgagatgatgacagagctcctggccagcgcacgggacaagatgctgtgcccctcggagtccatgctgacccggtcgctgctcctagaggtcatcgagctccacgctaacagctggaaccctctgacgccccccatcacgcagtactacaacagaaccatccagaaactgacagcctgacagccagggggcctggcaggcggcccacgggcagctggggccctggtgcacagggccagatggacaggcgggaggacaggggtggccctggcgggagaaagaaatggggaggagggcaggcagagtcggtggccagtctggagccagacggggaagggagcaaatccctgagaggagtgcccccgcacaagccccccagcccgagcatgcaagctcacaccaataagggaagcatgtttctttttcctggtggccctggccctccccttcctcactcccgcctctcccctccccatcagacccatcccccacggagctttgtgtgagggatctcatcgctgtgactcctcggagaccttggcagcctcgcacgccggggcaccgcttgggtcagaaaggacctcggaaggctgaaaaagtgggtcggagacgggctcgcattgttcccgcatgctgtcagccgcagtcgccaactggcagcaggcgacgtgtagcagatgtccgggaggacaaaggcaggcacggtccccaccagccgcccgtaattgacggcctttgtcagccatggcagagctgacgctccacctcccacctccaagtcctcctcactgcagcccccacagcctcaggcctagggggtcaggcgcagcgggggagatggagtttgcagttccacttgcactcttttgtttattgtgttttatttttcaaaagtcggttgctttgaagtctctttggccaatgaaaatgcccgtgatgtgatcacacagtcagcactgttgaggacccccggattagtgggagatcaaacccagctcccctctagaagaaggattcgagccacagacagcttgccagtagccaattagggtaattggaaacttctgccccggcggggggtccccgctggaatcctgtgttcctcgccactggcttccagcgcctctgttttctcaaagggctgatactgtcaccactgggaccaagttaaacctggtcctggccccaggggccttgtggcaaacagggcacagaacgagactggcaaattaaaaccaaaattctagatggtgtcttgcgctccacacgcaggtcttactggggaaaaggatgggagtgggggctccccaggactcgattttagctaatgcgctgtgtcactgccccagctcggacgtagaagcccagccctccgtgagctcttgggaaaggggtgaattcactgggtcatggaagggacagtcaggtgaccagcggggtcgccagatgaagcttcccagccgggaaacaagacggggtttcttggcaggccctggtcctggggagcaggccctgttgttggctggagaggaaggtgtggggtggaacaggtgtccacatagctccatctctgggggctggagcacacactttgatgagcccccccggaaatgatgtcagagcctagccgcttccttatttgctcttttattgaggccgggcaggccctgggtcactttggaggcccctcttggtccacactggactggccgggaggtgatgggcggggaaggttctcgtgattgattgattctgagtctgagagtggcgagtggggagaggcttccccagttctctccagctttccctgcagctgcaacctgccctctggtcccaggtgtggagcctttgcctgtctctaaaaagagcctgttggcgacaaggtgtagggggcacaagtttacctgaaacaggtcagtggtctctcccaagaagcgcacgccacctctggtccctggccctgaaccctgccttcttcctccctccacggtttcttcccagactttctcaagctcctcctcactgcccttcctccccagcccagcctgggaacacagatgccccgcgggtaggaggcctcgagggaggagccgggctgatgcggggctgctcagggcaggccccagggcgagcttgccatcgtggccaggcagcctccacctgtgcttcagtggcccctgcccccctgaagcatgtggggtttgtccgctaggaggaggcaaggcccccgaagagaggagagacctgggagtgggagctcaggtcagggaggaggcaggggagtggggtctcccagacccaacggtgagctcagagcaagcttcacgcaggacgctccgaaacactgtgtggagggggctgtgttgtgggcaccttggggcctgattctccttcctccgaacgggctccttgatggcctggccacaggggcagctccccattggctgttaggaccagagtgtgaagaagaagtgaaatataaatatgtatacatatataaatatatttttaattacatgtcgtgtcacggtggctccagacatactgtttgcctagtttattccactgcttgaaagcgcttcctagccaatctgaacaacaacactttaagctgtttttctaaatgcaggttgctgctcctttttcagatatggaaggaaaacgttaagactattttttttttaaagaaacaacagtcaagcctaaaatttgagaccccgaggcagcttcccgagggagactgctcagacaggaactgcaggacagaagtggatgccccacagaccctggccccctccccaagtccatcccctctctgtggcatgaggaaggccgcgtccgagttgacctctgaatgtatgtgatgagaggcagagctggatattgcatttctaaggcttgcattgctttcccctcgcccgcggttcttggcgcatggaagaggcggtccagccatctgatgttgatcctgtctcagtctccccactgcctgtcaggatgagttagtcattgtttttctccgaggcggcctgcttgccacagccctgctccccaaggcctggtggctttgccgaagctctgggaccgcagccccagcgaggcccccaacctcacccagacgaggccaggagccccgccaccctccacgggatgtgcaccctcagaccccattctctctgttcgtccttccttgaccagtctgtaaaccttcactgtttggggatcgtcctgtccatccatgtaaatgtaaatgttggccgagtcggtatttattctgattgatttttattttattctattattttctccgagggatgagggtggggggtgtgggaagggtaccacagatcaggccggggcagctgtaggggcgggggcccagacagccaggccgccaccagagcagccccatggggtgccccagacgcgggcctccaagaagccaagtcccagtctgttttctggcatcagacaccggcccgtgttccttgtcagacagacagactctcaggcctgcctggggagtcgtgtccctcagctgcagggcactgtgttgggaaaccattggctgggcctttgaggacacagatcagaagaaagaaagacaactttcctctgcgcggaacactcacacggaagggctggccgcctccctgagccggctgggagtggacgacaggacctacctccccagagcaagggcctggggcttcccgccaaagctgccgcggaaccccgctagtgcgaccaccctccctccgtcggtatgtcctgctttccagctgaacccaaactacaagtgggtttaaaaaaataaacaccaccaccaaaaacaaaatgcccagagtctgtgctctttgtgtgttcagcaaaagaaaccttttccccaagctcatgtgcctcagctatactagcagggcctccaggagctggcccaggagatgagctgaggggaagattcttgcaagaagttggtccaggagaccatgggtgaaggagacttacttacatcccccaaaactgggaactaactatgacctatccaaagtgacctggacctgtccaggatcaagccagtcctggacaaaatggcttttgcactaaaggtttggtttaaccaaccccccccaaacctaccccttccctggaaatgtcactgtggcatttggcaatgagtcatttcaagagggctgagatttgggcccagtggctttcaaaagtcaacagcgagtggctgtccagtcccagttggtcaaatgagtctttcatcaacgagtccccaaagggcccagtgatttcttttcctgtgatgacatgtctcttgttttgcacaatcttgtctatggcaaggcactggggacactgtttcctggtaacgctcccctttccttggggattctttctggctagaacttgctggtccttcagctccttgcaggggtcgcaccagagcaccaactcccttcctccttccctggcctggctacaatggcggccagggcctcccaggagccgggtgaaggcatgttgagattcgggccttgcccttcactgagtcacacacccaccatgacactgacagggacagccagaagtccacagactgggtagagagagagaacattttaattaaacaactgaggtatgtggcgggccaatttttttttttttttttttttttttttttttgagatgatgatggactctcgctctgtcactcagcctggagtgcaatggcacgatctcagctcattgcaacctctgcttcccaggttcaagcaattttcctgcctcagcctcccaagtagctgggattacaggcacacaccaccacgcctggctaattttttttgtattttagtagaggtggggtttcaccatgttgcccaggccggtcttgaactcctgagctcaggcaatctgcctgccttggcctccgaaagtgctgggattacaggcatgaaccaccgcttccagtcctaatttttgtatttttagtagagacaagttttcgccatgttggccaggctagtctcaaactcctgacctcaagtgatccacccacctcggcctcccagggtgttgggattacaggcgtgagccaccgtgccaggcccaaatttatttttataaaaatgcaaagcagtagaagcagacattggaggtcaagatcaaaggtagggcgacgatgaggaacagagagccttatcacaccctgcaaaagagaaaggagattttcctggatgggctagtcctgcttccagaaggccctaagttactgaatactacgagacacagcatcgaaataatacatgtttcaatcctgatttcaccaccatctttctgcttgtaggcattctcttgtcattttagagtgtttgtttacatttgtactgggatgctcacagcgtaacttataagggccttttaaggaccaaggcaaagatgatgatagcagaaaaataaagggttgagcagttgaaatgggaaagaagtggtcctgccttactgatctccctcattcctgcagttccgcagcggcttccttacacggtctcagctggtcccgtgaagtaggcaggtgagtgttttcgattcccattttatagatgcgccaaaggctgatcaccagaagagccaaggcgagggtgagcccagaaagtgagtgggtccttcagactcctcatccctgcagcgccccagggagccagccagtcacaccagccagacaaaaggagcagccagctgcccccgggactcggcaggctgcgggcaggccacgtgggcttcccgcttcattggtggaaactaggaccatgatgaaatacctcagatcaggagatttcagtggagtgggcagaaggagcgatggtgcagaatttggtgccgttctataaaaggacccattatcatatgtgcagtgtgtgttgctggatcccagtttcccccaggccagtgagggggaccctgatagggggacatatcaagcatcagggtcaatacccgaattgcctgggaacattttcaaactacatactaaaacagcacacacatacacaccaatattttcagaatttgggccttggggagcccctcttcttactggtacatgtgtgctatgccttggatgggtgcaagagaaaagatggttgagagccgccatccatcactcctggaacacagtacgatgatggccatggagagctgtcataagtagtgcagaattattgtctggggacagcaggccatgctgctgtgctcttttgcaatctcagggtctgccatcttggctgaaacaacactggctggcacatctgcaacatggggcaggggctctggcaagttgcttgaatgtggaacagaatccataccatggactcgggctgcattctcactcctatgggccttaggtacttttgccttcataggccccttcttccatttaaaaaaaaaatggaaatattatgactacattggtaatagagacaaatatattatttttattaaaacattttctcccacctagaagttcatttttttacccctgattttaaaaaaattaaaacactttgtgggcccctaaaaaacattttgtgggctcctgtcttagtccattcaggcatctgtaacaaagtaccatagacttggtggcttatgaacaacagacatttatttcttaaaatactagaagttggatgtcccaaatcagggtgccagcatagtcatggtctggtgagggcctacttcccagtggctaatttattggatcttcatggcagaaagagagtaagagactttgctggggtctcccttataagggcactaaccccattgataagggctccatccctctgacctcctcacctcccaaaggcacctcctaataccatcatattggggattaggatttcaacatatgcatttaggggacacaaaaacatgccatccatagcagcaccctttgtatatgcctaacaggtgtattggccctacctgagtgtcatctgagctgggagtcccacctttctctgctgcccacctgatctctgggtgactcagggctggggagggggagtggttcaaaagcagtcttccaaggaagcagttggcccgtgctggaagcagatgcagtagctgcctctgccctggactggctgccagccagacagctccaagcgccagccagagcagctgtgtttgccgcgctaaggaggctggcccctgagagcccgattcatcacacagcactttctcccctctgcagccctttagcacacattatctggttacggtctcaccagagccccgtgaaagaagtaaatacaatgcttatatccatttcaaatctggggaaactgaggcttacagagccatcccataggtttgaatggggctttatagtctttaaatatatgactatgttcgatccttacgacagcgctgccaggtgacatgtttttgacaccattgtaaagaagggagacaggctcacagaagcagagtaacaatcccatgtcatgggacctgtaggcacaaagaccaggcctcgaattgctgccttcttagtcctaagatgggactggtgggtgggtatggggaccaggctgaggacccaggccacctttgtgcctgagtcccctgatccaggcctgtggagtgcaggtctgtgcttcctgctcagtgtcccataattctaactggtctccatcttcagcctccccattcactgggcatcccctggctcccaggcagagtcctgagtctcctgcaacccatgggggcatccattccatgggtggaatcagtcccaggtgacagattaagtcttacaatatggccaggccaggcacagtggctcaagcctgtaatcccagcacgtcgtgaagctgaggcaggaggatcacttgagcccaggagtttgagaccagcctgagcaacatgacaagaccccatctctacaaaaaaatatatatatttttaactagctggtcgtgatggcacacacctgtagtcccagctactcagggggctgaggcaggaggatcactcgagcccaggaaatcaaggctgcagtgagctgtggtcgcaccactgcactccaggctgggtgacagagcaagacctgtctctaaaaaaaaataataaataatatggccaggaggccaggcatggtggctcacgcctgtaatcccaacactttgggaggccaaggtgggtggatcacttgaggtcagtagttcaagaccagcctggccaacatggtgaaaccccatctctacaaaaatacaaaaaaattagccgggcatggtggcgcagcctgtaatcccagctactcgagaggctgagacaggagaatcgcttaaacccaggaggcagagattgcagtgagccaagaccgtgccattgcactccaccctgggtgacagagcgagacttaatctcaaataataataataataataataataataataataataatatggccaggatcccacagctgacctgaagcagagatggttcaagggtgatgctctgtctcctagtctcatcacctgtgcccacgtctttcaagtgaacccctacttgggtcccaccttgtgctgggggtgctataaggaaataagcaaaggagacaatgccttaaccaccttggcatggtcagtctcctgggagctggaatttccagacaacagacaacctctcataggcctagcccaactctgggtaggtcctggtgcagggtccctgcctgtggcatctgctgtgctacagagagccaacacctggcccaggccttccaatggggaccattcagggcttgacgaagcttcactttccagccccagagaggaaggaccaccattcccctcccttcccagaacaaatcaggtgaaacccaaatacccacctaggccaaaagaagaaaacttccagtgggaaccaagacaggctagcaaggtgaaaagagacttattctatagcatttcccccaaataacaaaagtgtgattaaagcaggtgagaagccaattttaacaacacttgtatgcatacacagacccttgcaattctgcacactctaaaatcttactttttgtggcttagaatgtttcagcactcagtggagtttctgcagccagcagtcacacctacagagtttcaaatccgtgtaaacgctgtgtcagcctaaccaccagtgtgattctgtgtcattcgggggcaaatgttgatgtttcttgggtaagtgaaagatcatgcagagagcttccggaagaccatccttaggagctgaactgaaagaaggcctctcagaggggccacagcctccttctccctgtgctagagacaagtccctaatagccatctatgctcaatgggactcaatgtgtctcgggagcctggaagcctttttctgccccattcctgacatcatgccacctacacatcagacacaaggcacccggcccactccatcacctccagttcccagaaatgtgcagggagctcaggtcagggctcttgaatctcctgctgacccagcagaacatacgacacaaaggcatctcaaaggcaaacaaaatgggtgggagggaggctcatggcccaggcgcgtcatcagtgcagtcctgttcagccagggcaaggctcagccgggtgcagcttagaggaaaaggagaagtgctgaggctgagcaggtggggagggactgtaactcatgaggtgtgtcgccagattggaaagggggctcagggtccgtgttgcctagctactgccatgtcactgtgtgactaacaagccccaaatctcaggaactgcaacacagaggttcactgttcctgatcacaggtctgcagatgggctgtctctgatccacaccatggcctccctttctggtgagaaggggcagagctcagcatgcagtgagtcacagaagttagaaagcacgtgcctctgtctactgccacctctttcaggaagctctccctgactgctccctagtcagggttacagatcacccctcggggctcccacagctgccagggatgttctgccacagtcctgctccctgggcatggccattggtgtgtagatggcagatgcctgctgaggatgagcgtgacttcgtcccctctgtctccccagcactaagccagggcctggccccagcaggtgccccataagcatgtgggggatgaagggaatggtccaggtactaagggactgaggggcttggggagggaagagccagctgtgcctggagccacatactcgaggcagggcactcagggccagggaggaatacagggtggggcacgggcagggccttccagtggggagagctgggggtcctcaggggcctgatgtctcactgtctagagaggcctggaggtgggtggggagtgctctgtggtcatgggtgccagagtcttagccagtgcggagggcaccttcgtgccagttaggaggtgcccttcctccaggtgcccagccctgccccagaaccctgggagctgcctcagacccacagctgggcacccttgtgtaggacacaacctgggcgctgcatgtgagactctctgggtgtggagtgtgactgtgttgtgtgggggtgcgggatgtggtatatacgcacacacgcagggagcggggtatgtgtggttggagagggttgcgttgtgtgtacatggtgtgagaatggagaattagtgtggtatgcgtgtggtgtatgtgtgtgtgctgtgtgtgggtgtgtgtgatgtggggtgtgtgaatttgtgctgcactttgcaagcctcccaggctgggtggcctctgtgcagggagagctgggaggcctagctgtgagggtgccacgtcctagagccagaaacacaggtgtctcagtggccaagccttcgcctgcccctgggagtggggccggcacggggtctgcaatggcagagaacgggctgaaggtcctcagtgggcaggcacagctggcctcccctcacgaaggcccttccttccagaactctggactatcccttagttagggagggaacggtctggacagactgagccgaggaaaatattcctggtcaagggatgccctcagcttgaggcgcctggtcggaggctcagaagagatctgggggagatgccgggtccacacaaggatgatgttctggaaaccggaactgcccaacggtggaggaggccgcttcctaagggagcaaagccccacaccctatgcccttgatgagttccagcaacactgcggccccctcagccatggtgttggaggaatctccccttcacggtgcagggcatgggtcagaacacgaccccacagacccctcaccctcctgggttctatagaagcagtggggatgccggggccacctccttccatcaattgcacctgctgcccctccccagaagttcctccatcgcttttccccagtggcccctccaaatactccaggataccaggatgtggaaggcactttaaagccaccctctcgttttacagatgaagacactgcggcccttacagggaagggactcgcccaaggtcacagaggtacagctaacaccacgggcacgcctcgaaccaggcacccacctaagcgccctcatctcctcacaccacgcccgaggtgggaccttctccatcttacacaggggaggacttggcctggggttgagagaggccaacatggcccaggtcacagcactagaaagacggcaggattctcacagggtcccctctgctgccaaggccctgctgctgaccctgacgcacacactcggtgtcccccacacagcgatgaatcagatacgtccacagagagaggtaggaagaggtttagtgaggccaggcagctcactcggcttctttgagcctcggttcatctgctgaaaatgggaatgcacaatcccatcttgctagactgtttggagaaacagtgcatgagctttgagtcctccacaaattacggctctcttccctcttaaccacgagactcgcccgccttgctgggtctgtctgctgctgattctcttgggcagtgggcgtgcagtaaagcctatctgctctcccgctaggacccactgggactggggtcagtggacaggtgttggtgtggggtttggctgaacttctaagcacttttgaagctgagacttaggttgctggcctcaccatcctcagtgaagcactaacaaatgagccaaagagtcacccaccaaacgccccactaagcacccatcagctgaccctgaacacctgctgggtgcaagacagagctgagccctgccctgggagatacagaaggaagacacacctgccctaccctcaagccgagtgttgccactctaattgaagatttaaggccagtcgctgtccaggtgaatgccacagtcccttcctgtgttcccagtggggaacctggcaggcggcggagagggcggcatgtaaagaaaagcccacaatgaggtgttctgctgaccacacacagctgcaccttctggtgatggagtcgttaatacctggagagggggccacccagcgaggcagtggcgtagggacccagtctcctggtggggagctgacccagcacacgaggtcggcctcagggtgggctgccagtgtgcaaacaagtgctgcctggggtcaggcagacaacggtcaaagtcagagtctctttatcagaagaagacaggaagaattaagggagacatcttcctgcagcatgcagaatggattaaaggggagaggaacggtgaggaacagcaggaaaaccagttaattggccaggtgggaggcacctccatgggggaggaaaactaaagagggttctgcgggctctgatgttcagccaaggccagctgtctccatcgcgggcgcctggcatggtgcagaatgaggcgtgacacagaccttcattttctgtagctgtaatctacctctttaaatagcaaaactttttattttcattttttggtagcaatctttccccgggggatcctccacatcccaaatttctcagaagtcagcgtgtgttgacttccttggtgactcaggtccttctgacaaggctaatgagtagactagactgcaacacggggttagcctcaggattgtcaaggtagaccccgtctgccttgcttttttaattactggatctgcattttacaattgttctcccttctctgtcatcataaaattcttcttactactatcagtatacctgttgtggcctgagaaactagaccaccaaacttacccaaactatttgccgagtaagaggaaataggccctgagtgagggcctgaggggcattttcataccaaaaagcatgagctttcctgcatgaatgggggttcgaagccacccattgatctgctcagaaaccatctttgcctgctttctcatccccggtgactttcaaaagtatgggacctgccagataagaaatgttttgctgacctagaattaaagttgtgctagtccctggggtcctcctgaggggcccctgaggttggctggggttggggatgggacttattctagttttccagggaggaaggctgagcctcagaggatcagaatgggccaagatcagacagtgagtcagggtgagtcatgcggcctcgaggccacaccacacgtcccagcatcagagctgggcagaagggaactggaggcccctgctctcagggaaagggcactggattgagagtcggcagagaattctagtcctgcttccaccccaaccagctaggtgctcatgaaagtgttctttgggcctcagttcccccatctgtaaaagaaggatgggtatgttaga

SEQ ID NO: 849 - DNA, 5410 bp, Homo sapiens
gtcagatcagggatcattttttttccttcctctactccctcccccctacccgcccctccctccctgtttcccttccctccctccctcccctctctgctgggtctgtgcgctggggcgcccgatcccctccgcagctgggacgctccgaactcgaggcaggagtcggctctccggagcctcgtccctcccttccccttccctgcccccttcccccacccccgactcgggcttggcgcggcggccagaggaaccccgagtcccggcccaggcccctgagctggagggatggaaaactcctctgcagcatcagcctcctcggaggcagggagcagccgctcccaggagatcgaggagctggagcgcttcatcgacagctacgtgctggagtaccaggtgcaggggctgctggctgacaagacggagggtgatggcgagagcgagaggacccagtcccacatctcccagtggacagcggactgcagcgaaccgctggacagcagctgttccttctcccgagggcgagcccccccacagcagaatggcagcaaagacaactctctggacatgctgggcacggacatctgggcggccaacaccttcgattccttcagtggtgccacctgggacctgcagccggaaaagctggacttcacccagttccaccgcaaagtccgacacacgcccaagcagcccctgccacacatcgaccgcgaagggtgtggcaaagggaagctggaagatggggatggcatcaacctgaatgacatcgagaaggtccttccagcctggcagggctaccacccgatgccccatgaagtggagatcgcacacaccaagaagctgttccgcaggaggagaaatgatcgaaggcggcagcagagacctccggggggcaacaagccccaacagcatggtgaccaccagccaggcagtgccaaacacaacagggaccaccagaaatcctaccaggggggctcagcaccccacccctcagggaggcccactcaccatggctacagccagaaccggcgctggcaccatggcaacatgaagcacccaccaggcgacaagggggaggcaggcgcacaccgcaatgccaaagagaccatgaccatcgagaacccaaaactggaggacactgcaggggacaccgggcacagcagccttgaggccccccgcagccctgacaccctggccccggtggcttctgagcggctgcccccacagcagtcaggggggccagaggttgagacaaaacgtaaagacagtattcttcccgagcgcatcggggagcggcccaaaattaccctgctccagtcttccaaagacagactgcggcgaaggctaaaggaaaaggatgaagtggccgtggagacgaccactccccagcagaacaagatggacaagctgatcgagatcctgaacagcatgcggaacaacagcagcgacgtggacaccaagctcaccaccttcatggaggaggcccagaactccaccaactccgaggagatgctgggcgagatcgtgcgcacaatctaccagaaggctgtgtccgaccgcagcttcgccttcaccgctgccaagctctgcgacaagatggcgctctttatggtggaggggaccaagttccggagcctgctcctcaacatgctgcagaaggacttcacggtgcgcgaggagctgcagcagcaggacgtggagcgctggctgggcttcatcaccttcctgtgcgaggtcttcggcaccatgcgcagcagcacaggcgagcccttccgtgtgctcgtgtgccccatctacacctgcctcagggagctcttgcaatctcaggatgtgaaggaagatgctgtcctttgctgctctatggagctgcagagtacaggccggctgctggaggaacagctgcctgagatgatgacagagctcctggccagcgcacgggacaagatgctgtgcccctcggagtccatgctgacccggtcgctgctcctagaggtcatcgagctccacgctaacagctggaaccctctgacgccccccatcacgcagtactacaacagaaccatccagaaactgacagcctgacagccagggggcctggcaggcggcccacgggcagctggggccctggtgcacagggccagatggacaggcgggaggacaggggtggccctggcgggagaaagaaatggggaggagggcaggcagagtcggtggccagtctggagccagacggggaagggagcaaatccctgagaggagtgcccccgcacaagccccccagcccgagcatgcaagctcacaccaataagggaagcatgtttctttttcctggtggccctggccctccccttcctcactcccgcctctcccctccccatcagacccatcccccacggagctttgtgtgagggatctcatcgctgtgactcctcggagaccttggcagcctcgcacgccggggcaccgcttgggtcagaaaggacctcggaaggctgaaaaagtgggtcggagacgggctcgcattgttcccgcatgctgtcagccgcagtcgccaactggcagcaggcgacgtgtagcagatgtccgggaggacaaaggcaggcacggtccccaccagccgcccgtaattgacggcctttgtcagccatggcagagctgacgctccacctcccacctccaagtcctcctcactgcagcccccacagcctcaggcctaggtgatgtgatcacacagtcagcactgttgaggacccccggattagtgggagatcaaacccagctcccctctagaagaaggattcgagccacagacagcttgccagtagccaattagggtaattggaaacttctgccccggcggggggtccccgctggaatcctgtgttcctcgccactggcttccagcgcctctgttttctcaaagggctgatactgtcaccactgggaccaagttaaacctggtcctggccccaggggccttgtggcaaacagggcacagaacgagactggcaaattaaaaccaaaattctagatggtgtcttgcgctccacacgcaggtcttactggggaaaaggatgggagtgggggctccccaggactcgattttagctaatgcgctgtgtcactgccccagctcggacgtagaagcccagccctccgtgagctcttgggaaaggggtgaattcactgggtcatggaagggacagtcaggtgaccagcggggtcgccagatgaagcttcccagccgggaaacaagacggggtttcttggcaggccctggtcctggggagcaggccctgttgttggctggagaggaaggtgtggggtggaacaggtgtccacatagctccatctctgggggctggagcacacactttgatgagcccccccggaaatgatgtcagagcctagccgcttccttatttgctcttttattgaggccgggcaggccctgggtcactttggaggcccctcttggtccacactggactggccgggaggtgatgggcggggaaggttctcgtgattgattgattctgagtctgagagtggcgagtggggagaggcttccccagttctctccagctttccctgcagctgcaacctgccctctggtcccaggtgtggagcctttgcctgtctctaaaaagagcctgttggcgacaaggtgtagggggcacaagtttacctgaaacaggtcagtggtctctcccaagaagcgcacgccacctctggtccctggccctgaaccctgccttcttcctccctccacggtttcttcccagactttctcaagctcctcctcactgcccttcctccccagcccagcctgggaacacagatgcctcgagggaggagccgggctgatgcggggctgctcagggcaggccccagggcgagcttgccatcgtggccaggcagcctccacctgtgcttcagtggcccctgcccccctgaagcatgtggggtttgtccgctaggaggaggcaaggcccccgaagagaggagagacctgggagtgggagctcaggtcagggaggaggcaggggagtggggtctcccagacccaacggtgagctcagagcaagcttcacgcaggacgctccgaaacactgtgtggagggggctgtgttgtgggcaccttggggcctgattctccttcctccgaacgggctccttgatggcctggccacaggggcagctccccattggctgttaggaccagagtgtgaagaagaagtgaaatataaatatgtatacatatataaatatatttttaattacatgtcgtgtcacggtggctccagacatactgtttgcctagtttattccactgcttgaaagcgcttcctagccaatctgaacaacaacactttaagctgtttttctaaatgcaggttgctgctcctttttcagatatggaaggaaaacgttaagactattttttttttaaagaaacaacagtcaagcctaaaatttgagaccccgaggcagcttcccgagggagactgctcagacaggaactgcaggacagaagtggatgccccacagaccctggccccctccccaagtccatcccctctctgtggcatgaggaaggccgcgtccgagttgacctctgaatgtatgtgatgagaggcagagctggatattgcatttctaaggcttgcattgctttcccctcgcccgcggttcttggcgcatggaagaggcggtccagccatctgatgttgatcctgtctcagtctccccactgcctgtcaggatgagttagtcattgtttttctccgaggcggcctgcttgccacagccctgctccccaaggcctggtggctttgccgaagctctgggaccgcagccccagcgaggcccccaacctcacccagacgaggccaggagccccgccaccctccacgggatgtgcaccctcagaccccattctctctgttcgtccttccttgaccagtctgtaaaccttcactgtttggggatcgtcctgtccatccatgtaaatgtaaatgttggccgagtcggtatttattctgattgatttttattttattctattattttctccgagggatgagggtggggggtgtgggaagggtaccacagatcagggcactgtgttgggaaaccattggctgggcctttgaggacacagatcagaagaaagaaagacaactttcctctgcgcggaacactcacacggaagggctggccgcctccctgagccggctgggagtggacgacaggacctacctccccagagcaagggcctggggcttcccgccaaagctgccgcggaaccccgctagtgcgaccaccctccctccgtcggtatgtcctgctttccagctgaacccaaactacaagtgggtttaaaaaaataaacaccaccaccaaaaac

SEQ ID NO: 850 - protein, 591 aa, Homo sapiens
MENSSAASASSEAGSSRSQEIEELERFIDSYVLEYQVQGLLADKTEGDGESTQSHQWTADCSEPLDSSCSFSRGRAPPQQNGSKDNSLDMLGTDIWAANTFDSFSGATWDLQPEKLDFTQFHRKVRHTPKQPLPHIDREGCGKGKLEDGDGINLNDIEKVLPAWQGYHPMFVEIAHTKKLFRRRRNDRRRQQRPPGGNKPQQHGDHQPGSAKHNRDHQKSYQGGSAPHPSGRPTHHGYSQNRRWHHGNMKHPPGDKGEAGAHRNAKETMTIENPKLEDTAGDTGHSSLEAPRSPDTLAPVASLPPQQSGGPEVETKRKDSILPERIGERPKITLLQSSKDRLRRRLKEKDEVAVETTTPQQNKMDKLIEILNSMRNNSSDVDTKLTTFMEEAQNSTNSEEMLGEIVRTIYQKAVSDRSFAFTAAKLCDKMALFMVEGTKFRSLLLNMLQKDFTVREELQQQDVERWLGFITFLCEVFGTMRSSTGEPFRVLVCPIYTCLRELLQSQDVKEDAVLCCSMELQSTGRLLEEQLPEMMTELLASARDKMLCPSESMLTRSLLLEVIELHANSWNPLTPPITQYYNRTIQKLTAP

SEQ ID NO: 851 - DNA, 5736 bp, Homo sapiens
gtcagatcagggatcattttttttccttcctctactccctcccccctacccgcccctccctccctgtttcccttccctccctccctcccctctctgctgggtctgtgcgctggggcgcccgatcccctccgcagctgggacgctccgaactcgaggcaggagtcggctctccggagcctcgtccctcccttccccttccctgcccccttcccccacccccgactcgggcttggcgcggcggccagaggaaccccgagtcccggcccaggcccctgagctggagggatggaaaactcctctgcagcatcagcctcctcggaggcagggagcagccgctcccaggagatcgaggagctggagcgcttcatcgacagctacgtgctggagtaccaggtgcaggggctgctggctgacaagacggagggtgatggcgagagcgagaggacccagtcccacatctcccagtggacagcggactgcagcgaaccgctggacagcagctgttccttctcccgagggcgagcccccccacagcagaatggcagcaaagacaactctctggacatgctgggcacggacatctgggcggccaacaccttcgattccttcagtggtgccacctgggacctgcagccggaaaagctggacttcacccagttccaccgcaaagtccgacacacgcccaagcagcccctgccacacatcgaccgcgaagggtgtggcaaagggaagctggaagatggggatggcatcaacctgaatgacatcgagaaggtccttccagcctggcagggctaccacccgatgccccatgaagtggagatcgcacacaccaagaagctgttccgcaggaggagaaatgatcgaaggcggcagcagagacctccggggggcaacaagccccaacagcatggtgaccaccagccaggcagtgccaaacacaacagggaccaccagaaatcctaccaggggggctcagcaccccacccctcagggaggcccactcaccatggctacagccagaaccggcgctggcaccatggcaacatgaagcacccaccaggcgacaagggggaggcaggcgcacaccgcaatgccaaagagaccatgaccatcgagaacccaaaactggaggacactgcaggggacaccgggcacagcagccttgaggccccccgcagccctgacaccctggccccggtggcttctgagcggctgcccccacagcagtcaggggggccagaggttgagacaaaacgtaaagacagtattcttcccgagcgcatcggggagcggcccaaaattaccctgctccagtcttccaaagacagactgcggcgaaggctaaaggaaaaggatgaagtggccgtggagacgaccactccccagcagaacaagatggacaagctgatcgagatcctgaacagcatgcggaacaacagcagcgacgtggacaccaagctcaccaccttcatggaggaggcccagaactccaccaactccgaggagatgctgggcgagatcgtgcgcacaatctaccagaaggctgtgtccgaccgcagcttcgccttcaccgctgccaagctctgcgacaagatggcgctctttatggtggaggggaccaagttccggagcctgctcctcaacatgctgcagaaggacttcacggtgcgcgaggagctgcagcagcaggacgtggagcgctggctgggcttcatcaccttcctgtgcgaggtcttcggcaccatgcgcagcagcacaggcgagcccttccgtgtgctcgtgtgccccatctacacctgcctcagggagctcttgcaatctcaggatgtgaaggaagatgctgtcctttgctgctctatggagctgcagagtacaggccggctgctggaggaacagctgcctgagatgatgacagagctcctggccagcgcacgggacaagatgctgtgcccctcggagtccatgctgacccggtcgctgctcctagaggtcatcgagctccacgctaacagctggaaccctctgacgccccccatcacgcagtactacaacagaaccatccagaaactgacagcctgacagccagggggcctggcaggcggcccacgggcagctggggccctggtgcacagggccagatggacaggcgggaggacaggggtggccctggcgggagaaagaaatggggaggagggcaggcagagtcggtggccagtctggagccagacggggaagggagcaaatccctgagaggagtgcccccgcacaagccccccagcccgagcatgcaagctcacaccaataagggaagcatgtttctttttcctggtggccctggccctccccttcctcactcccgcctctcccctccccatcagacccatcccccacggagctttgtgtgagggatctcatcgctgtgactcctcggagaccttggcagcctcgcacgccggggcaccgcttgggtcagaaaggacctcggaaggctgaaaaagtgggtcggagacgggctcgcattgttcccgcatgctgtcagccgcagtcgccaactggcagcaggcgacgtgtagcagatgtccgggaggacaaaggcaggcacggtccccaccagccgcccgtaattgacggcctttgtcagccatggcagagctgacgctccacctcccacctccaagtcctcctcactgcagcccccacagcctcaggcctagggggtcaggcgcagcgggggagatggagtttgcagttccacttgcactcttttgtttattgtgttttatttttcaaaagtcggttgctttgaagtctctttggccaatgaaaatgcccgtgatgtgatcacacagtcagcactgttgaggacccccggattagtgggagatcaaacccagctcccctctagaagaaggattcgagccacagacagcttgccagtagccaattagggtaattggaaacttctgccccggcggggggtccccgctggaatcctgtgttcctcgccactggcttccagcgcctctgttttctcaaagggctgatactgtcaccactgggaccaagttaaacctggtcctggccccaggggccttgtggcaaacagggcacagaacgagactggcaaattaaaaccaaaattctagatggtgtcttgcgctccacacgcaggtcttactggggaaaaggatgggagtgggggctccccaggactcgattttagctaatgcgctgtgtcactgccccagctcggacgtagaagcccagccctccgtgagctcttgggaaaggggtgaattcactgggtcatggaagggacagtcaggtgaccagcggggtcgccagatgaagcttcccagccgggaaacaagacggggtttcttggcaggccctggtcctggggagcaggccctgttgttggctggagaggaaggtgtggggtggaacaggtgtccacatagctccatctctgggggctggagcacacactttgatgagcccccccggaaatgatgtcagagcctagccgcttccttatttgctcttttattgaggccgggcaggccctgggtcactttggaggcccctcttggtccacactggactggccgggaggtgatgggcggggaaggttctcgtgattgattgattctgagtctgagagtggcgagtggggagaggcttccccagttctctccagctttccctgcagctgcaacctgccctctggtcccaggtgtggagcctttgcctgtctctaaaaagagcctgttggcgacaaggtgtagggggcacaagtttacctgaaacaggtcagtggtctctcccaagaagcgcacgccacctctggtccctggccctgaaccctgccttcttcctccctccacggtttcttcccagactttctcaagctcctcctcactgcccttcctccccagcccagcctgggaacacagatgccccgcgggtaggaggcctcgagggaggagccgggctgatgcggggctgctcagggcaggccccagggcgagcttgccatcgtggccaggcagcctccacctgtgcttcagtggcccctgcccccctgaagcatgtggggtttgtccgctaggaggaggcaaggcccccgaagagaggagagacctgggagtgggagctcaggtcagggaggaggcaggggagtggggtctcccagacccaacggtgagctcagagcaagcttcacgcaggacgctccgaaacactgtgtggagggggctgtgttgtgggcaccttggggcctgattctccttcctccgaacgggctccttgatggcctggccacaggggcagctccccattggctgttaggaccagagtgtgaagaagaagtgaaatataaatatgtatacatatataaatatatttttaattacatgtcgtgtcacggtggctccagacatactgtttgcctagtttattccactgcttgaaagcgcttcctagccaatctgaacaacaacactttaagctgtttttctaaatgcaggttgctgctcctttttcagatatggaaggaaaacgttaagactattttttttttaaagaaacaacagtcaagcctaaaatttgagaccccgaggcagcttcccgagggagactgctcagacaggaactgcaggacagaagtggatgccccacagaccctggccccctccccaagtccatcccctctctgtggcatgaggaaggccgcgtccgagttgacctctgaatgtatgtgatgagaggcagagctggatattgcatttctaaggcttgcattgctttcccctcgcccgcggttcttggcgcatggaagaggcggtccagccatctgatgttgatcctgtctcagtctccccactgcctgtcaggatgagttagtcattgtttttctccgaggcggcctgcttgccacagccctgctccccaaggcctggtggctttgccgaagctctgggaccgcagccccagcgaggcccccaacctcacccagacgaggccaggagccccgccaccctccacgggatgtgcaccctcagaccccattctctctgttcgtccttccttgaccagtctgtaaaccttcactgtttggggatcgtcctgtccatccatgtaaatgtaaatgttggccgagtcggtatttattctgattgatttttattttattctattattttctccgagggatgagggtggggggtgtgggaagggtaccacagatcaggccggggcagctgtaggggcgggggcccagacagccaggccgccaccagagcagccccatggggtgccccagacgcgggcctccaagaagccaagtcccagtctgttttctggcatcagacaccggcccgtgttccttgtcagacagacagactctcaggcctgcctggggagtcgtgtccctcagctgcagggcactgtgttgggaaaccattggctgggcctttgaggacacagatcagaagaaagaaagacaactttcctctgcgcggaacactcacacggaagggctggccgcctccctgagccggctgggagtggacgacaggacctacctccccagagcaagggcctggggcttcccgccaaagctgccgcggaaccccgctagtgcgaccaccctccctccgtcggtatgtcctgctttccagctgaacccaaactacaagtgggtttaaaaaaataaacaccaccaccaaaaac

SEQ ID NO: 852 - protein, 590 aa, Homo sapiens
MENSSAASASSEAGSSRSQEIEELERFIDSYVLEYQVQGLLADKTEGDGESTQSHQWTADCSEPLDSSCSFSRGRAPPQQNGSKDNSLDMLGTDIWAANTFDSFSGATWDLQPEKLDFTQFHRKVRHTPKQPLPHIDREGCGKGKLEDGDGINLNDIEKVLPAWQGYHPMFVEIAHTKKLFRRRRNDRRRQQRPPGGNKPQQHGDHQPGSAKHNRDHQKSYQGGSAPHPSGRPTHHGYSQNRRWHHGNMKHPPGDKGEAGAHRNAKETMTIENPKLEDTAGDTGHSSLEAPRSPDTLAPVASLPPQQSGGPEVETKRKDSILPERIGERPKITLLQSSKDRLRRRLKEKDEVAVETTTPQQNKMDKLIEILNSMRNNSSDVDTKLTTFMEEAQNSTNSEEMLGEIVRTIYQKAVSDRSFAFTAAKLCDKMALFMVEGTKFRSLLLNMLQKDFTVREELQQQDVERWLGFITFLCEVFGTMRSSTGEPFRVLVCPIYTCLRELLQSQDVKEDAVLCCSMELQSTGRLLEEQLPEMMTELLASARDKMLCPSESMLTRSLLLEVIELHANSWNPLTPPITQYYNRTIQKLTA

SEQ ID NO: 853 - DNA, 5710 bp, Homo sapiens
gtcagatcagggatcattttttttccttcctctactccctcccccctacccgcccctccctccctgtttcccttccctccctccctcccctctctgctgggtctgtgcgctggggcgcccgatcccctccgcagctgggacgctccgaactcgaggcaggagtcggctctccggagcctcgtccctcccttccccttccctgcccccttcccccacccccgactcgggcttggcgcggcggccagaggaaccccgagggatggaaaactcctctgcagcatcagcctcctcggaggcagggagcagccgctcccaggagatcgaggagctggagcgcttcatcgacagctacgtgctggagtaccaggtgcaggggctgctggctgacaagacggagggtgatggcgagagcgagaggacccagtcccacatctcccagtggacagcggactgcagcgaaccgctggacagcagctgttccttctcccgagggcgagcccccccacagcagaatggcagcaaagacaactctctggacatgctgggcacggacatctgggcggccaacaccttcgattccttcagtggtgccacctgggacctgcagccggaaaagctggacttcacccagttccaccgcaaagtccgacacacgcccaagcagcccctgccacacatcgaccgcgaagggtgtggcaaagggaagctggaagatggggatggcatcaacctgaatgacatcgagaaggtccttccagcctggcagggctaccacccgatgccccatgaagtggagatcgcacacaccaagaagctgttccgcaggaggagaaatgatcgaaggcggcagcagagacctccggggggcaacaagccccaacagcatggtgaccaccagccaggcagtgccaaacacaacagggaccaccagaaatcctaccaggggggctcagcaccccacccctcagggaggcccactcaccatggctacagccagaaccggcgctggcaccatggcaacatgaagcacccaccaggcgacaagggggaggcaggcgcacaccgcaatgccaaagagaccatgaccatcgagaacccaaaactggaggacactgcaggggacaccgggcacagcagccttgaggccccccgcagccctgacaccctggccccggtggcttctgagcggctgcccccacagcagtcaggggggccagaggttgagacaaaacgtaaagacagtattcttcccgagcgcatcggggagcggcccaaaattaccctgctccagtcttccaaagacagactgcggcgaaggctaaaggaaaaggatgaagtggccgtggagacgaccactccccagcagaacaagatggacaagctgatcgagatcctgaacagcatgcggaacaacagcagcgacgtggacaccaagctcaccaccttcatggaggaggcccagaactccaccaactccgaggagatgctgggcgagatcgtgcgcacaatctaccagaaggctgtgtccgaccgcagcttcgccttcaccgctgccaagctctgcgacaagatggcgctctttatggtggaggggaccaagttccggagcctgctcctcaacatgctgcagaaggacttcacggtgcgcgaggagctgcagcagcaggacgtggagcgctggctgggcttcatcaccttcctgtgcgaggtcttcggcaccatgcgcagcagcacaggcgagcccttccgtgtgctcgtgtgccccatctacacctgcctcagggagctcttgcaatctcaggatgtgaaggaagatgctgtcctttgctgctctatggagctgcagagtacaggccggctgctggaggaacagctgcctgagatgatgacagagctcctggccagcgcacgggacaagatgctgtgcccctcggagtccatgctgacccggtcgctgctcctagaggtcatcgagctccacgctaacagctggaaccctctgacgccccccatcacgcagtactacaacagaaccatccagaaactgacagcctgacagccagggggcctggcaggcggcccacgggcagctggggccctggtgcacagggccagatggacaggcgggaggacaggggtggccctggcgggagaaagaaatggggaggagggcaggcagagtcggtggccagtctggagccagacggggaagggagcaaatccctgagaggagtgcccccgcacaagccccccagcccgagcatgcaagctcacaccaataagggaagcatgtttctttttcctggtggccctggccctccccttcctcactcccgcctctcccctccccatcagacccatcccccacggagctttgtgtgagggatctcatcgctgtgactcctcggagaccttggcagcctcgcacgccggggcaccgcttgggtcagaaaggacctcggaaggctgaaaaagtgggtcggagacgggctcgcattgttcccgcatgctgtcagccgcagtcgccaactggcagcaggcgacgtgtagcagatgtccgggaggacaaaggcaggcacggtccccaccagccgcccgtaattgacggcctttgtcagccatggcagagctgacgctccacctcccacctccaagtcctcctcactgcagcccccacagcctcaggcctagggggtcaggcgcagcgggggagatggagtttgcagttccacttgcactcttttgtttattgtgttttatttttcaaaagtcggttgctttgaagtctctttggccaatgaaaatgcccgtgatgtgatcacacagtcagcactgttgaggacccccggattagtgggagatcaaacccagctcccctctagaagaaggattcgagccacagacagcttgccagtagccaattagggtaattggaaacttctgccccggcggggggtccccgctggaatcctgtgttcctcgccactggcttccagcgcctctgttttctcaaagggctgatactgtcaccactgggaccaagttaaacctggtcctggccccaggggccttgtggcaaacagggcacagaacgagactggcaaattaaaaccaaaattctagatggtgtcttgcgctccacacgcaggtcttactggggaaaaggatgggagtgggggctccccaggactcgattttagctaatgcgctgtgtcactgccccagctcggacgtagaagcccagccctccgtgagctcttgggaaaggggtgaattcactgggtcatggaagggacagtcaggtgaccagcggggtcgccagatgaagcttcccagccgggaaacaagacggggtttcttggcaggccctggtcctggggagcaggccctgttgttggctggagaggaaggtgtggggtggaacaggtgtccacatagctccatctctgggggctggagcacacactttgatgagcccccccggaaatgatgtcagagcctagccgcttccttatttgctcttttattgaggccgggcaggccctgggtcactttggaggcccctcttggtccacactggactggccgggaggtgatgggcggggaaggttctcgtgattgattgattctgagtctgagagtggcgagtggggagaggcttccccagttctctccagctttccctgcagctgcaacctgccctctggtcccaggtgtggagcctttgcctgtctctaaaaagagcctgttggcgacaaggtgtagggggcacaagtttacctgaaacaggtcagtggtctctcccaagaagcgcacgccacctctggtccctggccctgaaccctgccttcttcctccctccacggtttcttcccagactttctcaagctcctcctcactgcccttcctccccagcccagcctgggaacacagatgccccgcgggtaggaggcctcgagggaggagccgggctgatgcggggctgctcagggcaggccccagggcgagcttgccatcgtggccaggcagcctccacctgtgcttcagtggcccctgcccccctgaagcatgtggggtttgtccgctaggaggaggcaaggcccccgaagagaggagagacctgggagtgggagctcaggtcagggaggaggcaggggagtggggtctcccagacccaacggtgagctcagagcaagcttcacgcaggacgctccgaaacactgtgtggagggggctgtgttgtgggcaccttggggcctgattctccttcctccgaacgggctccttgatggcctggccacaggggcagctccccattggctgttaggaccagagtgtgaagaagaagtgaaatataaatatgtatacatatataaatatatttttaattacatgtcgtgtcacggtggctccagacatactgtttgcctagtttattccactgcttgaaagcgcttcctagccaatctgaacaacaacactttaagctgtttttctaaatgcaggttgctgctcctttttcagatatggaaggaaaacgttaagactattttttttttaaagaaacaacagtcaagcctaaaatttgagaccccgaggcagcttcccgagggagactgctcagacaggaactgcaggacagaagtggatgccccacagaccctggccccctccccaagtccatcccctctctgtggcatgaggaaggccgcgtccgagttgacctctgaatgtatgtgatgagaggcagagctggatattgcatttctaaggcttgcattgctttcccctcgcccgcggttcttggcgcatggaagaggcggtccagccatctgatgttgatcctgtctcagtctccccactgcctgtcaggatgagttagtcattgtttttctccgaggcggcctgcttgccacagccctgctccccaaggcctggtggctttgccgaagctctgggaccgcagccccagcgaggcccccaacctcacccagacgaggccaggagccccgccaccctccacgggatgtgcaccctcagaccccattctctctgttcgtccttccttgaccagtctgtaaaccttcactgtttggggatcgtcctgtccatccatgtaaatgtaaatgttggccgagtcggtatttattctgattgatttttattttattctattattttctccgagggatgagggtggggggtgtgggaagggtaccacagatcaggccggggcagctgtaggggcgggggcccagacagccaggccgccaccagagcagccccatggggtgccccagacgcgggcctccaagaagccaagtcccagtctgttttctggcatcagacaccggcccgtgttccttgtcagacagacagactctcaggcctgcctggggagtcgtgtccctcagctgcagggcactgtgttgggaaaccattggctgggcctttgaggacacagatcagaagaaagaaagacaactttcctctgcgcggaacactcacacggaagggctggccgcctccctgagccggctgggagtggacgacaggacctacctccccagagcaagggcctggggcttcccgccaaagctgccgcggaaccccgctagtgcgaccaccctccctccgtcggtatgtcctgctttccagctgaacccaaactacaagtgggtttaaaaaaataaacaccaccaccaaaaac

SEQ ID NO: 854 - protein, 590 aa, Homo sapiens; identical to SEQ ID NO: 852

SEQ ID NO: 855 - DNA, 351748 bp, Mus musculus
  misc_feature (1)...(351748): n = A, C, G or T/U
cattttcctttacagtattttaaatttgattcaatatccatctaaacagtaacactggatctaagaggccattactcatcaaaactgtataatattgccatcatttcagtatgtaaatagtagttaggaaaatatcacacattttctaggcaaattttaaaaactaaaaataaattgttgttcatatttcagtgatgtgaaacaagtgtgaaaggtgtagctgtgatattttagatttcacacaaagagaagaaataaaaaggaaggaaaaaaaggaaagggaaaggaagagaaagcaaaagaaggaaaagaggaaaaaaaggagggagggaaggagggagggattgagggagagaaggaagggagggagggagggagggatggatgaagatagacaaggaggaatggaaagaaaagagacccaaaggcaaagggaaggaggcaggaactaggggaggaattctggggacactccttgactccccctagtggtcaacaagaaacagcacagcaggctcccctgatggctggacagtatttttggaaggctgcagcagtggtgtgagaagtgattcagacaaagcccagaaaagaaagccagtaagcagcagaggtgcaagaagacggttcaaggccagttagtggtctctcagctctgcacgcacagctgtgcgcgcaccacagtaaagatcagcgaggtagcaaagttcatacattagtacttgtgcgagacaccacatctcagggagactaatgactaaaggtgaagctatcatatcagatttcctgcccatggcacttccttcacccctccacagtaatgtgagagactaaataaaatcgcatagtaatatatctgtatcaggcaactgatgctaaacaaaaacaaaacacacacaccggaaaagtcaacagtaaaacaaacctgatttcatctctaaactcaaggggacaactctggtgtggactgcatatgtcctgtagcatcttctcctgttacaatctttttcatataaatacatgcaaaaaagtttaacttcaattttgtggctttcacagcctgactacatcaagaatagtctattttccattgcaaatacaaacaactcagaaaatagaaagtctacacaaacattttttaaaagactagtttaaacctaggctaaaatttttgtgtagcacaataaactgcatctgaagcaagactatcattgcaatcaaacttcaaaataataaaaagaaatgtacaaagcagaaatggcttcaattaataaaatttaaagtgctaaattaaatgtcaaatactctaaatgacaagacatattgcctcagactagataactataaaagtatgaaaagtctatacctgtacctagttatataaatacctaagtgtagaaatttataaaaatatagatataaagacagataaagggataggtagacagacagacagacagacagacaatagacaaaaaaaatctacttctggtaaataaactcaacatcactcaagcattctcctctcctgaccagttttgttactcagttctctctgtcccttgctgtggtcattagggtgctaaggggactaattactgcctatctctaccctctcccttaattgccctccaggcaccatccttgtaatcactgaaacgttctcagctcagccaggtgctccctagggcatctcatatatctccaggtttggaatcagagtatacagtcaggataggatgtccaggttcctgatgccaggggggacagaactaatattgtttgcattattaaaatctgtgtccttgatccttttgtacacttaaattgcatggtctcagggtagggtcaaatatcctttgtctttaaggctgtccactaatgataattattcttgtatgtgtataaatggaagcatacctatgaacagtaccatacgcccccagattaagtaaaggccaaacaaaacctctacattgctatgaattagtttcgtgaaaagtaacctaaatgaagaagtagacttcaactattccaactatccctccaccaatgtgtaaacgaaattgctactaattacttataattgtggtccatttctaaatctacttgaattatatgataaatatatacaccagcaataaaacatgaaaattaaattcattgttttcaaggaaaattcataatgtatatagaaactctaaatattaacctctaaattctcaaattctaaagcctcaggtttttttggtagcgtgtacagcagtaaagtattattaataacagcataagcaactgctgccagccatggaggccggcaactgattgaaaaggtctgaaatcagtcttacagtactgcacaaagctgacgttcccatttgtaaaagaaaccataatgctaatcttcaactacttgattcaagcaatacctgtaataaaaaatcatttactttttataagtatgaacacatacgtgcatgaggataaatgcatagattaaataaagagaggttattactcattaaaagacacgtttttatagtaacagatttgcatctgctctctgaaaaaaaaaatgtttttgcacctaaaacacacggagacacaataaattcaagctcaattactcagatatcacagtcgtatttacggatgagaaagagaaggcgatgtaatcattaccatgctatacatgctatacaatgtaatcattgccatcctgatgctatacaaacctgctttacagttacagtcgacaggaaaccatctgactgcaaagcacatattaaataattcagaacctaaaaagtagggttttttttttaaagaaaatagtaaatttgtatttctattattttaattcctaaaatattcaggtacaaatccagattagtattgataatataatataaacatgtaaaaataaaatcataaatataagtatatgctttatttagcatatatatgtatggagcacatacttagcaaatgccaaaaaacttaaccagtaagtgataaaagactcacagtgattcaacttaagaacaaaacaaagggctggagagatggctcagtgattaagagcactgactgctcttccagaggtcatgagttcaaatcccagcaaccacacggtagctcacaaccatccctaatgagaaacaaataaagatcctatgggccagagtgaatggggactcagagcgagcaggggccagagcaatagggagaaagggaagggggggggggagatttaaaaaaaagaaaaagaacaaaacaaaataagccaactgaatttaagaaaataatatataaaattttaaggaattttaacttttttataaaattgaatgaatatcctttacatagcataaacctacctctaaaaggtaagtgagcataagacagagtacgtaatgctgctattaaacattagtcacaggggggaaagcaaaaattccactttttagtcatttttacaagttattcattaaaaaatagcaatactagatgataaagcaaacgaagtaagaaaaagcataggttactcatttctaccaatccaccctccatcctgattcagttattgttaaaaaaaaatgttataagttcaatttagtagtgaactgtagccatctactggaaatgaacggttaaagcaaacgttaacattacatttctaagaaaccagcattctttgtgcttaatacattggaccagaaaaaaatgaacaatccctaggtgacataaaagttattacatctgctttatagtctcatacgcacaaaggtacacaatttagctctttatattttatttgttttaagagaacagccttgctgtgtagcccaggctgccttttaacgcggagtcttccgcctcggcctccggggtgctgaggctacagatcctgccatcatttcagccaagctgtcgttggcagtgctactgttgattcagaactttccatcattaaaagactttcctagccatcttatttttccttgtattctttgtaggtcacaaattccaaaatgattactaaaagttttaagccaaattatccaacaagcacttgtagttatcaaattataaactagttcccaagtatagttttctgcttttttcactttgcccaacactcaaaagaagcttttcataaaggaagctccaagttttaattgaaaaaaagtacagtctgaaagtttcctttattgttctattaggggaactatttaacagtttggtttaaatgccaggggtaatgctgttcttgtggaaacattactcaggcgatgtctactggaaagccatcaggttactcttgtttgtcaagacatcaaattttaccttgtattttatacttcctcaaataccccttcaatataaaagagcaaacaaccaagtagccttctacaatgttttcaattataaatgctcaacttcagaattctacatgtgtgtgtatcagcacaaacacgagcactgcaatgcagtgctatggttttgcttactgctaacgaaggagaaagaactgacaagtattggtacttaacaattcagtaacagcacaatggttaaaattacaacagataccaatttaatccaagtcttattataagtatattagtgtattcacaataaaaggcaataacatgattcttatttattcaaggtatatctatccttttaattctttcaactacaatacaacatttaataagttatcctagagatatactaagtattcaccattataactctgataatacactagtactttaaatattaaatcaatttagaactcaaactttttacaaaaattagaatgcaatattgctaatttttaagacattgctaaaaataaaatgaatcactgctaatcaaaatacaatgagaaaactcaaaacaagctttgtcaatactaaatttacgtccaaaacaatacctctgaaaatgtactaccattcttgtaaccttgtaaagcaaaagacaaagccagcgttatttcccagatgtctaagtgcacggtactaggagcagcttccgtgggaaatagcccattcactggctacagcgttcttctaactccagagaatctgtcaatacggctcctgaaccactttgaaagggactccccctgaaagcctaacactaaaacaacagatctccaccaatcaaccagaaaacgtctaagaaattcacaaaatttcaaagtaaccagctggttggactgaaagtcacttctgcagaaacactgcaccagcaggttcctcaccacagcccactacaatgactccctaggcctgacttcaccctcaggactggcacatccctcacagcaaggccggtgaattctagaaatgtatgcacaaagcgtaaggcatgcacgggtggactagaaccgtgcggtatgctcggtgtcgggaactctccctcttcccaccactctgctccaaagctgacagtctttgttaacagcccccccccgcccccccctgttctcaggaagcatggctgctcatagcttctgtgccatatccaaaaggcaagcacaaacttgtggccgctcgtgagttctctgctataaacacctactgtatcctgtaagaggagccgagactgaggaaactcaatacgaaaacatactgtttgtattatttttaacttggaaagttttgtccaaatagtcttttgtttttattttccagctcaagggaagaaatacctcatgaaggtatgaaatttagaggaaaactacagagcccacccctaaaaagcctttctattgtttaaactgccaaacttctctgcagaagtgctaacatagcaccactgccccctgctggcccttataatttcaacatctatggtgacctcactttaaattctcagtatgggggttaaaaaaaaaaagccatgtcaatctaatgactaataacaaataacaaataacaaagataattaaaatacagtaatctacaaaaatatacatccacactgtatgttattttattcttaatttaaagagaaaatggctgaggtgcattttgaaaccgacagatcaaaaaaaccaagcaagcattaaaaccttttctctagaattgtatccacactactgcctttcaataatcagatctgcttaattaagataaggagcagaaacggaagtacacggcatctcgccataggcattgggtcttcagatagttcttctcgtatactgtgaagtgatggtccactagccttgaataaccagcaaaagcgtctttacagagcagagacgaggggctgccttgtctgaaggaaaagctgctcgacttgatgatatcaaattcttgagcaaactttccacgaagtcatctttacctacaggaagtcaattaaaatgtgacagaagagattaagggctctgtgacagatctcactggtctgtactcagttcagacacagcaatgctacaacactgaagttacaatgaatatttaacaatccagtgactaactactctaccagagttttcaaaataatgtgatgtccctatttgttagagcaagttcactctggcatcaattaaatcatgaactgtcatcttgattgctctctttgttgagggacagcgcatttccatctaaggatcagctcagctttatatctctgcaagacaattcataattctgagcagcagaatgaatgcacaaattacattcttcaaccttttactcccactaaatctttccttttttccactttgctgagcctgaatattttattcctccatcaaatatgcatcccattaattaagttaaattacttctgactgccaaatattctctgtcgatgactgtcaacagaaaatacatggctgtgaacttctaatgacacagtctcgcttaaacatgagttacaaccttcacgcaggcatctacaggcaaattatcggcctcttcttcaaaaccgggctgaaattaaatgctggtttctttttcttcagcttttaacaagtacacaatagatgacacccgtacttgacaaagcaagcactgcaattttaattatataccttttcctcatcttttaattgctgttgttaatcagtcattaacttcttcccaaagtgcaagattcttaaatctccttcaaaacatttcggctcaataaattccatcgctcttcataactaacatataattttgtctatttttaaaactgtcattttccaaacagggtatttttaatgtgctctttaaggatgacagtaacagggttttaatcataacttgcataaaattatcactctctaacacatcaagactaaaacaactcagaaagacttaaatgggttgtttaagaataattttgtaacataaacaccaaaatttctatctttacccttgagctacagtcccactaagctaagggagaaatataatattttatatatagacatgtgcatacacacccacgcgtgtgcgtgtgtgcgcgaacacacacacacatttcttacccctccacactatagaaatggaaatgtggctctcgataatttattatgctatcacagtgtaatcattagtgcaaaaatatttaattacagtgaaactgttatgacattacgataaagcaagtaaattttttctatatcttaagataatgtcttctttggggtaacaaacaatattcccatggcccagcccttctacaaatacttcaacaatgccatcttggtcctatgtaaatgttatccatgttttacggagtaactgagagaaagctgaaatgccatgggctagcttctctcctatgtgagccatccagaagagggtgaccaagtacagatccctaatcaaacagactacctagagagaataactaatattaacatagcattcatattctaactgacctgaaaatgcagaaagtgttgtttttctcgatgtttaaaggtttctaaacttctatactttcttttaaagtatgaaaacaattccaagtaaaagaaccatcagtgtatgtatcccgatagcacctagagaggagtgagcgtcatagagcctgccctggcacaagcagctaatcagctctatggtacatgtagatcacacagcccattagatacaagctgagaaggaaccatcacagacagtgggggcaggagagctcaaaggactctgcaacctgccacagggtatgacaaaggcaattttgaggcttgccccttcctgacagaaaataaagggaaccctattattgacaagccagcttgctctcgatagaatttgcagtatcttcattctatctatataatctcagggtcaacagggcaactgtattacaatgaatgcacaaggtccttgtacatctctatcagtttcctgttaacccatctcttcctaagagaccatatacatgcaaaaggagtcctaacagctttgccactgtcagttcctgaaagcaaagtctctgcatattgatcactcagaatatacataaaaatgaacaaacataaaaatgaacaaattatcaattaactttgctgtttaaacatgtgtccttatttctctcattaaaagactgatagtttaaaaaaataaaaaagaaattaaaacacacacacacacaaacacaatgaagccagaaagcttaagaagtgtatcaccatgactgataagaatgccaactcagtgtaatataagtagcactgaaaccacgagcaggaaggcctgggtccttgtcttcacctaagatgtcatttaagctcttgattcaattttctttatgtgtccactagatgtattaactcagacaacagtctaagttcaataatctatttttaaaatgaattttaatagagcactaaaatttctttactatttaactataacctacatctttaaagcaagcgtctgctgtgaggcatctaactgtcagaggcacgctagcgtttaatactaataccacaagtccatctgcacgtcctacttcatctacaaaagcagttctaaaagagttcacaaaggatcctacactgcgccagatttacaggaatcttctagagtcttgtgaagcacatggataactgaaaccctttaaagggccttcagacgaccctttcagttcaagataacctctaagccctcagtggtaagcaatactttttaaaacctaatgagaattgcaaacaaaaacaaaataactttgtctagacagttgcgttaaaaaacactagcaacttatctgatgcttgatacaatgcacaaagctaatggagtggcagccaggggagggagaaagaactcaagggatggaaaaaaaaaggttagcacagaacaattttaagaaagcataaaatgtgtaaatagtttcaaatgaaaaaaagggtgtggcaagtaagagtaagagaaaaccactgtgtgtagttgttgttttaaacttgttgctttgttttgttgagacaggatttctctgtgtagccctgtgtagcctagaacttgcttgaggatcaagctggcctcaaacccaagagatctgctgcctccgcctcccgagtactgggattaaaggtgtgcaccaccacacccagccaagtacattattaaatagtatatacttttaaaagggagtagcttcctgccccgtgctgtgctgtgctgtgctgcgaatgtagctcattcctgtgtgaaaacacagtcatagcacccatcttccctgttgaatgcgaacatggggcttgtggctgcgtcaccggatgccttctcattatctgtgattaccttgcactaagctatatggaacagatatcagtctgtctcatcataattatccaaaaatcaatggatccctaattaaaattataaatagtgaaattttcttaaaataactgtttgaccaattcccacaccccatgactctgaacagtaatttacttcccacctccctatttagacacagtagtcccttctcttcttccttctccttccagaaactgtcaagtcatataagttcttaggagagcagggggaggggggcaatggagggagggggagcaaggggtcggagggaagactggcaggcaggcaaagagctaacagtcaacatgagagcatgaaacagctctgagaaacacccatccctgcgattgtcttcctggctttataatcatgcttcaggcagtgttgatttagtttccccacctgcaaatagccacctcttgtcgacatacatgtgccacagccccggtctggacaggtagccctggttcatctgcctcactaccagtggcgatcacatccactactacctgctgcagaagcaatttctgagttagccacgatgagccgagttttgagtatttgaggaagatgttaattcaagctgaactccagcaagcactggtaaacgctagtgctcagcaggcagctgtggactatgtccttccttccacagccacacacaggaggactttctgcagaattcctaacaagccatgttactccacccagctacctttgctgtttagttaactaggttggaaacacgaacatctgtcttaggaacagtcctcaactaactttgccagagtctgtggggagacttttttatattcctcaacagttggaggtttccattcaacctggctccacatatagtgactcttggaccttaatctgttttctcctcaggtctctgccctccatggggcttgagagcacaaggccaatacacaattctgtcaccatgcttgcacaaagaaactcagaggaatctaccaaaagagaggagaatgaagaatcagttgacagcaaagtgtcccttctgcttacacttccaacacctgtgctcaagcacttcctgggcaaatcaggaacactggcagagaaaagacttaggaaactgattagcaaggggaagtgcatctaaggaaaagcagacacagaacaggtgacaaacaaaggccaaaacccagccgctcctaagctgctgtgacaacggggcacttaaacaccttgaccccagtatgacttttaataaccaggagccaaaaatagatattcaagacactaccacacgactatttcactggagggaaaaaaacagaagctgacattttcaactataaccaacatgtaaaaatgcttattttatctctagtgtgttctatcagttaaccacacttggtggccttggaataagtccatgaaccatgggaagacaagcgccatgtgaccatgcagaaggaaaggcgcactggtggcaatgacactctccaccactgtgagacccactgcaaggagctctcctctccacatcgctgtcttaccccaattctctcccgaagtaccaaacacttcagtggaaaataagagagagttctagaataatgtttgtatctgaatattctaatcaaaatattgcttaggttttcaaaccatagagtgagttgcattataaaataatgtagaaaatactgataatttgaaaggtatttaaagaattttacccccagaagggtaaaggcttcacctgggttaagtgacagaagagacagtatttgttgcatggtgtttttgaatttcaaagtagaggcaaaagcatagtcataggaaaagcaataaaatattatgtagaaaatacaaacaattcatctttgtaatggatgtgttactattaagttagatctttcttacagaaaacgagaggtgctatagtttatactgttacagacaaaatgcactgctacagcacaaaaccaacttctctgtttctaaccagaacaaccagctgaagcaaatacttattttatttggatacatctgtagatatgatgggtgtaattaattgttcagctcaaaatgcaattctgtggtacttttaatgatttaggtatacacagctttagttctcaaagcagactaaaaatagtgattttaatttattcctgctgcctacaattacccacaaccatgtatttttaaatatttccagcctataaaaattactaatttttgccacttgtgtttatctgcatttagactttgatttggataaattaagctctcaagtgttccttgctttatgaaactctgcatgttgtacacttcaacacaaataaatgacttgtaccattagaggtttaaataatgtaatgtatttcatgctcagcctgaagctgggttccaatgaagttgctaatgcacgtaatgattaagtgtaactcaaatactaactgtgttgttgaaaacatgacaggcaataatttggtctattatattctgccatttaattgcctagtacagacattctctgacacgttatgaagcaatgatttacaattattcaagctgcaaaggtcagaaagtgacattataatcatctacatagagatccctctaatgcacaaaaactaggtaatcacacacacacacacacacacacacacacacacacagttaactgcattagaaactttctatttaaggttttctaaatcaactaggaaaaaacatttcctaagcatactaatgtacaatttaaattttttgtggaatcttctcataaactgagtgaaatatttgaaaaaatgttcttattctctcctgattaggtaagacctattcaactatttaacttcatacacacacagacacacacatatctcaagactcaacacaagaaaatctaccactaagtaacatagtccctaattcacagatactgggtttatgcttctgaaaaatgacataaaaatttaggcatcattttttgggtctactgtaagttttctacaattgttctaagataattagtattgaaatataacaataacctatcttgatctattttaccccagtaccagttttaggcatgtttttccctattacatagagatggtcaaccatatataagtacaataaattatcaccagatgaagaacagagaggaaggggaagggagagggaagggggaggggctaatatcatttacagtaacacttacccacagggagaataaaacaaggaaatgaggcagggtttgaataccagaatatgaaagcaagactggataagcagtcttttatcagaacgtaaattttgacaaaaatggaatacatgtggctaatgcaagtagatgttatgctattatatgctacagaaaacaacctagatgaaaaacaatgaataaaaatcatagtaatggaaacagacacaaacaacacagaacagaaagaaaatgaacagaaaggggtaattaggagaggagcagccataaggcaggagggccgggggcagaagtggagcactgcatcaatacttgtaactgcgctccccgtctgtgcacagggagagcaaacaccagctaaaagagtaggagccagcaaaatcatcaaacgagacgagtgtcaaatgcagcatttacaccaaaccgtgaacaaatgctagcattcagaacacaatgcacatgggcgtattaacatgtgtgaaactgagcagtgtgaaactgatcctgggccttgtacatgttagacaagaggtctacccctaagctgcatcccaaatcccacatccagaatttaaaaaaaaaaaaaaaaaaaacaaactagcaaaacatgtagaatgacttttgggggttgagagttttcacattcttgacacctaacataagtaaagacagaggatcatgactttaataaaaagatgtgcctggtctatttttaagccaaactgtagttaaataaaactatccgcttttgcccagggcgatgttggtttacctctgcccccactaagcactatcacactggtagcagactttcacattgactatacattaaaaatctggatatgaatatcattgcactcataaaactcttctcctaatcatacttagatgtaagaaaaatactatacagaagatctactagaactagagatacggttccgaggatagagagcactggctgctcttgcaaaggacctgggtgtgattcccagaaccaacatggaggcccgtgagcatctgtaccttcagagtatccaacacggccttctggcctccacaggcaacaggcatgcatgacatccacatacacacatgcagacacacacacagaaaatcatcaataatttttaaaatggagggtagagagatggccttgaggttaagaatacatgtttttctttcagaggacctgagtttaattccgatttcccacacgatgatttacaatcatctataactccaactccagaaaatctgcagcatcctctaacctcacaggcactagggaccaagaatgctctgcctacgctcatatgcataaaatacacaaacattttttaaataataattttcaaagcagcaatttgcaagtcaacaaataaaactcagctctcctggaacaactttattgattttattcattatctgctccttaaaatatgaaatgtgcagtaatgtgttcctaacatgaaaagataaaccttgcccatagagaacggtagtcctaagtcagaaccagacaatggaaaccaggctttcaactcagtcagcttctgctgtcaaggtaagttaaaccctgctgtcccatggccaacatctgccaggagaggataaggaagagacaaccttcaaattcttgatctttaagattcagaaaactaaaagcaacataagtccagatgcaacaatttgaaaggcaatttttatgtgtgagttgacaattcagaataatacaatgacgtcttaatggaacccctaagacacatagttcacatggacctagaattttcctacacaaagacaagaaaaagcagccaaatacttacaagcaacctgctacattaatactaaagttatccaacagaatataataccatttccttaaatttcaccataagaaaactatgaggttactgcaaaaagaagtccagttttataactgttaattaaagaacgttcccacctcattgctttacacattactcaaccaggtctatttgagaaataactacttataactaaataaagaagaggtcattaatgaaatttcagaagactgagactaagatattaactactggagaaaagaaaacatagtacaggaccttctgtttgtgacaaaattacagaactaatgttcctgaaagatcacctcaccttttaaagcaggattctgtaaaaggtaaaatttatagcaattaaagctaatgaagaaatgcagcatagcctgcttatgttcaggaactaatgggtccactgagcatttgggagacgatttagccatcagtggtaatgaattgacactgtcagcagtgttaatgtaccagtgctctccagtgtcaggggcaagagccagtccctacttcttgttttgttttctattttaacttgtgttactctcctgcacctaacacatgaacgtaaacagccaaagacaccacgtcatgaaaatcaaaccgcctggttcatcactgctctattcaagctcactggtcaatgctcctccgctctctgaccttctcagagcgtctgcctttactgtaaggctctccaccctactaaattactatgtgtgacttttagactgggcttatttttagaaagaaagagaattataattatataggaggtgaaatttaaagcctaactctaagtctaaaagttaaatactaaaatctagtatgctttatcacccttcacacacagacacacacacacactaaaatgaagctgtctattgcaaacataagactcaatgcactcatatttgcttacattctattatcttggtgatcatgtatatgaactactagtgtgtgtcatctgtgtacagtaagcaatcagctaaggaaaggtgcattctccaaattatacatttaaacctgattaattctaaactgtttctgatactatgtatgtaaagtatgattctctggaaaagtttctttttctctttccaatattattaccctaaatttaaaaaacggataaaagatagatctcaacaaacctaatatgcaaaataatttttttttttacttatttctcacaaatgggaaagaaactgcttcctgcttcctaatggcgcatcttcactggagtcatgatcatcttctataactcagagactaacaacagtaagtgagatatcttctaaaattacgagacctatagaaattaaaatggaccatttgggacttgaccccagcagctaaactcagtagtaacaaaactcattctccaactgatcaggagtggctccagggcaaaggtccatcttcatttactttagctgcaagtcactgaaccatcaatttggccattgaataaatcacagaccatggttgataaaactgcttgcaaagttatttataaaactatcttaaggatcaaaaaatggaattgtattctggaaaaatgtattgtccaataaaaagaagaactgttcctgacttgaaggctgtttacgtgtttacgtaaacctgaagagccatctgcataagcataatattggacccatgagtttcagatttcttaagtttcacataaagtattttatatgatgtacttattagctaattcctctagcataataacattaagatatattttaataagaaagagagtattaaaatccacctctgaatgtcctgtgatacaccatatatgtcacagcattttaaaaccttttaaacatttctgctaaattaatgagttttgcatgaaggtagctcagtgctttctattaaatgtaacatatctgaaggacaattaaacattgtgaatgactccacaaagaatcatgaactaaaaagggaaagtagttctgaaatcacacaatacaaaaatacattatacactgtaaaaaagcatcatacactgctttaccacaccatccataaacactgagtagccaggcatctgaaacgaagtctcttggttttccttgtagaatatgtccaatgggaccagagtcattaatgagattaaaattaaggcagtatagcagaaggaaaagaaacatacatatgcgctcctaaagctatcttatctgggggagttttttgtctttaaatggaatttatagttctctctggcaatgtgaatgaacatcctataatttagtcaatttacagattacaggttcaaattgaccttgtagcccataaaattgctcatcttcagcacaggattagaagtgggagaagaatgtcataactgcatttaaggaatttaccataacaaagggaaggaggatacgcacgcataattttcgccactcttactcatatcagttttgaattctcaaacaatagctatcccgcacagggctcctggctctcacagcaaaggtgccttatttactcacccacagacgtgacacttgtactccctcatcccaaggtgccttttcacatggtttctggcatctccaagctgagctgttgcaaaatggcatatcttgcacttgaatggttttgatcctgagtaaatttaacataaaataaggtttggactcgagtcacacattacagataagacttttaactgtggaaaacaagctaaatgttaagtactactaccttcagtctaggtgagaactgctgtccccaaagtggatcacatgcattaatttgtaactttcttattcccataattatctcacccatacagttttaatgttttagtgagtcttcccaattctcaattatatttctaagatgtaaagtcaaagttaaataccatagacagattgaatgagatgttaaatatttttcatacaactgataaaaatatttcttgaagtattctttgtactaatggaaggaacattttaaaagcacaaatacaaacaaaatcactggtgtgtacagtgtgtcactaaggatatttctcagtgcccatcaacttgcctcagatttctccagctttgaattcacatgcacaaaaacagtagtacaaacgttctatccctgacctcaatgagtcgccagacacgagacacaggacataactgccttgctcttgtcatcgtgtcacagtctgtggtgcttcacaaaccacaagggtcaacatctcggttactcagttcactaacaaatgcttcaacacaagagcagcagtaacaacaacaacatattttaattaattagagaagagtgagattaaactataatccaaaacaaaacataacccctttcagagttgctagcaccactgtgagtaatgggaaagacaccacattattattattattattcattagtcagtcccacattaatgagaaataacaatctcctaaaaacatatgtacagactgtcttccagttttctaagtactacgtcttgaaagaaatcaaaacaataaagaccacagcttaaaatcattacaatgtttcttgttcatgattagtatgtaatttgggaatcaactcttccaatgtggtaagagtatgaaacatgtaaatttcaaaagttacagagtacaaataaagaaagtctcaatatttgatcaatgaacttttgtggagtcctggaaaagaaaataagcttgaactaaagcactcaagaaaaaaattaattcttaagtttgaatttagttcttaaaggtgatcaaaaacatgaagcatttcattttaaccttctaacataaatttaagaaggaggtcaacagcactgcatagcagacaaggctgagcacgtccctgttcaacgacagtgaggccgagttcacagtgcttcgtttctatggttggaaggaggtgtaaaatgcatacaacacccgaatggctctatctagtaagacttagatgtctgaatagcaagagcaggttgggattctagcttacagcagtaacattctagcaatcattttggaaacgatttttttaataacttatttaaatgatccagataaaattaagcctatgggcactttgaaacatgtgagagacagattcccgcatgggattttggaaacataagaatcgacccgcctgtggtttctgctgtggtgcttttccaaggacaacttggaaactattaataaaccatggtatcaagacctgaaacaaaaaggaccaaacatttatctgcaagatgacttggagacgcagatataaacacatggtggatctgacagcccccaaattctgactaggccggcccaggtggcactcacgtcccagtgagctgcacagaaacacctgtgattctaatctgctgtgcacagctctgaggaggtccttccttaagtcagggagacctcacagctgacagtcgtgatcctaactggctgtctaaagtgcccttcctatgccatcagcattcaaggaccagctgagctaaggcttctctgtgagaaaaggaagtctttctttttacttaaagatagtgtctcattcttacactggccatatgatacacattatgagtctacacatgtttaaatcacaaaacctataaaatcacatatttctcaatttgcctttctctcaggtgtatctgagcattaaaaacatccagggttatcttaagtaattctatcccttggagcagcattaccctcagaagatttttttttttaattttaatttggactataggatttttatggagaagaaaaacactaaagtggccttaactttctggtgcttgagtatttactaaacaaatccaaggacttgaaacgtcactctgcactcagacctacaggtcacacttctgctgaattctcactgctacgtgcacacacacatgtggcgttcaaactcagaaggacaggagcctgcaggtcttagagggagaagtaatgcagatgcctgtctttcctgcagaccatgcagagcatgcaatgctcactgactctagtgtagaccccagttctccctaagcattttgaacatctccctcactcgttctttcactcagtcattcacacccatccaacagttacactgcacaccaactttaagtgaagtgtgtgcagagtagtagtgaatggagtcagcccctttccaccgggctcagtctgcaagctaacgtggtgaactacatagtttctaaaccattacatactgagtaacagacacccagcactaagagttttcggtgaatttgcacacaccaccataggtacccacatacaaactttttccaaagggcataagggaccaaattactataaacacaaaacagaatggcttcctgatatcttgaggcttaagtgtactttccatgtgctgtgacataaaacacagaatgctacacaagagaggacacctgctccatgagctcctgaactgcaagataatcaggctgagtgcttcatagcacaaatgcacaggaagcaatatgctttctgcctacagttctttataataaaaacttttttttttttcgagacagggtttctctgtatagccctggctgtcctggaactcacttggcacacgcctttcatctcagcactcgggaggcagaggcaggcggatttctgagttcgaggccagcctcgtctacaaaaacttatttcttaagtgtgctgcttctatcacactaacaataattagaccaggtttcataaaacatatagcaaattccaaatttggaaccgggttggaagagtgagccatttccacctaagcaggactagcggccctgtgattactcgatctttcatagatagagaaagcaccagagttgtcctgggggggggggggaacgacagcatgaaattaaatctgaagaccaacttcccccaaaaaggtgactcaggaaggatgtgctctgcagtgcttccgagcctgcaaaaatgtacttgctgataagaccaacagaagatattaggaaaaaaagcatgctaacttttcctaaatgttacaatcaatgatgtaacttctataagtagggttactctgtcacatattgatagttacctcactttcacatccacattaacttgattttaaatgcaattaatacatatagtcaaggaagactaatggactacattctgcacttaacctggtagacattttcaaatggcacaagtgaccagtgcaaacctattttgcattgtaaacgactaaataaatcttaatggattaagaatgatcagctatcaacacacaagggaaattaagtgctgaaatgcctacattgattattttaaattattagccttactctattcttgaatctgtatgcttttagtgagctttaacacatttacaagacttattgactataattacaagagaattcaaggaatggccacatcaattataagcaacatgtcctgaccggacagtggcataaagaattctaaaaagagctgcattagcatcttcctctcagctttatccagctttatctgacttacgaggatatgttacgaaaacacattttctatgcataaaaacagcctggtacctaagatcacgcatgtcagagtgtgaggagcaacaacagagggtctgaccacgcaaaccagtaagcacccacatgcactcagtgatgaccctgcagcctgtgactagtggagctcaggcccacacgaggactaaaatgtttatatttacctcaactaatcctacgtgcctttccctgttactttcttcaaggaaaaattttgatctatctttaataatcatcaattactgataatgctctgtatctttctccttgtaaccagtttcaaaaactgcagaaatttaaagtatagatttaataatatgccattatttaaaagtacagtaaaataaaccttacagttttaatgaaaatatgttctttgaaatgtgaatttattattcaaatccactcataaattcaaccatgtagacagaacttgtctaagcagagcacaatgatttagaaaagctgtctatttaaaataaagaatgtatggcaggtttatagaaacactgcactgaatttttacataaatttagaacagtagcttatgcatttttcaccaaatatatatatatatatttttaaaaatttatccccaaactaaacattaccatggaatgttcagtgtatccaagtacagaccctaaatcaggtgtttcctcaatgaaaaccaaattccaacacatactgagaaagccatgttcacaaattctgatctttgaaagtagaatcttactgctgacagtcaaacttatagatataaactatatgttaataaatatgtttaaattactaatatcttaagaattttattaaggggcaggagagatggctcagcagtttaaaaccctggtttctcttccacaggagaacccaggttagattcccaggggatccaatgccctcttctggcttccgtgggtactgcatgcaagtggtacatatacatgcaaacaaaacacattaaaaataatacttaaaaaaatttcaggcatgtcttaaaacaaaagaaatttattaaaggctaaacactccttaatatgctctctgaaaccacaaagtgtcatttaatatagaatttggaaaaccaaataattaggacaaatgaaaagccataaaacatgggagttttacaaaggtatgaaacagtgctttttgacagaagtaaaagaaatgtgtccactagtctgcctttagagctgttacagctggattaattacctttggaagcatcaagtgtcaacacttctcagatacaagtggagcatcccacaaacgaatgtgaatcaggtggaagcccacaagcaaattcaagtagagctcacacttggttggacccaaagtcccaacttcattattctttttgcacgtcataggacaccaggggcttgctgcgcggcttacatacctgtgtgagtccgaatgtgagccagaaaggccatggagttgctactccgacacatcttcccacaatacttgcagacgttgccctggttctcctctctctcccgattgatctgctcggtgtcttccactatgtacttgtttacctcccgcagcaactcctcatgctgtcctttaatatgcagaaataaattctgttccgaatcaaagggctctgtacacttgacacatttgaaggtggcccctccttctggaagctcttctacactggcctgttcatttctcatgtgaccagcactagccaaatgctggtgaaggttgctctcagtatagaaggattttccacatagtaaacaatgaaagtgcttctcttttgtaggatgcttcatggctatatgaacattcaggccactcagtccatctgctaagaaaccacaatcatcacaccggattcgtgtggactcaccaaaagaaccaccttcaactttcttcttcttcaacccctgagcacagtctttcaggggcaactcactaactctccctcctgtcgccgtcagaccctcttctggctgttctaccaattcaccatcttcagtttttattctaattatggacgaatcaaacctgccaaaactgtacattgtttgccctttgtcatcaatacttattatagtctcataaacatcattactgtcagctgtgccattcgaggttggggcatcctcttccaaaatgacttcagcttcttcttgtgaatttatcagaatttccttattctcaagaataggatttgcttgcacatcttttaaatcttcagaagtctgctcacatccaaccttgttctggccaccgccatccaggtccagttgttctcttggtattttcattaccacagaggaagtagattcggcagaatggcccccatctgggtctccagggcagggggacttgtcaagaattttttcttcactatcatccacactgcctccctcatcttcacagggtgtacttctatccccaacagcatccaacacatcacggtttttctttgctgtctcacagtccacagcagagctcgctaggttttcactctgaagacagcctgggaggctgaggttagagggagtgttaggggacactatctccctgggtttcatacttttgtccttaacaaggggctgctgtaaggtctcacaaaaggagtgaccttcactaaaattagattcttgctcagtcacaactgtcactgaatcaggagcacagagtactttagacatacccaaattggtattatcatctaaaatagaacaatctgcaggatttctacattggagagtaccagatgactggtgtggatgtatttgaaattcctcagaattgtgtgaatgctcctcctcgggtatagtgatgttcttggatatttctgaagaacctgcttccacactagaagcgctgaggtaagactgccttttcattctatgcttctctgttgcagcatgcctcgtcatctctctgcgagtcaccgcatagtaatcacaggccatacagtaaaactggaactctttggtgtgcttccttttcacatgcagctcgagtgaagcggcagagtgagcactgaactcacactgaagacacttattgtcacttgaacctgcaacctctctctgagagcatgcatcatcaagctgtagcaggtcctctgtctctagagatagctgtccctttttatcagagagttgactgctaagctctccatctccagaaggaaatacactcccagcttcagcatcacctgcatttccaatgcccactcccggcgtttctaaagtgcgtgtgtctgacttagccggcttgctagcctgtgcgtcagaaacggtcactgctagagaggtgctatccttacatgcttcaagattaccaccttctgggccaacaactatgtctgaactttgtttcccatttgcttctatttctacccgtcctttatgtttcttggtggcacaatgacgttccatatctcctttagttacagtataatacttacatactttgcacaagtaactatactggtgactgtgtttacgcctgatgtgcacagtcaaatttgtaatactagaggccaaaagtccacagtgtgaacaagtccgagaaatgctgcctttgggcctccctctctttggagtagtggctaagcctaattcatcctctttggtgatgacaccagactgtggaagctccttgggtgttagcatactctgttcacgttgggaatgctcctgtgattgcacaccaacatggccttcgggccttccacttccagaaacactggactcttcttttttatcatttgcacctatacatactctttcaatgcactcttcaaaacttaaaccaatattgtttttcttagcattttcaagatgtttgcttcttttaatgtgcttctccattccttctttgctcaaagaataaagattgcatgctttacagagaaaatgatagtcctgtccatgtcgaagctttatgtgtctcgtgagaacagtggaggacctcgttttataaaaacacttcttacactgaaactgcggcttacttgaatgccgtgcttcagttccatggcttgccctggactcagcaggtccttcctgcgcggccttccctgagtcttctctagaatcggccgggttttctgattctacagtactgaaaggtagaacagaatcaccactcaatgatgaagccgtctttggttgaaccactaaactattatgtgactcggttgctctgtgttcttccacatctttctcagacaagaacagattacaagaggtgcagaaaaagcccatgccatgcttctccttcatatggtctctaagacctgtttcattcaaggaaataaaggaacaacactgacagctgaggacaggtgtcatgtgctgatgctgattactgtgcacgtgctcctccaagtctctccttgacggactagaaaagtcacaagtctgacaatgaaactgcatctctcttccatggcactgtttaacgtgaacttcgaagtctgtcttatttgcagctatctggccacactctgtacaagtgcactgcacagagagctggtggtcagctggctttactggcagggagcccagccgtgtggagcctgaaagacagaaggctgtcttgtcctgcatcacttctgggttgtctgaggtagtcacacacagactttgaacatctttgctcatctctacttgttccagcactggctgtgcgtttgttttcatctgtgttctaaagtgtttcatatacatcctctgagtttcatttgtaccccttttattaattcctagaagattaaaccttttctttgcctggccctttaaagtaaaagtgccacttcgtctgcgaaagctattacccaacactaggaggtttcgctcagatcttggccttgaggtggtactgatactgacatgcgccatctgtagggcatttttagtggattctggtttatttaaaagaccctctgagcttactaagccccctagctgtttgttctgattttcaggattttgagctacaccaaaactaacattttcctcaactacatgtgctttgcctgatgagattttcctagatggcaccatttcaacaaggagctcactaccaccagcactgtcttcagaaggggctcctctgcagtctttaaagtcattcccagtactcggcactactcttgaatccccagtctttgctattggtttagaagctcttggttttgttctaacattttttgttcccatgacacaggcttttttaggaaaagatggttttgttaagatctgtacgaatcctccacgagcagcaaggttctgacgacgaaggtgtgttttgccaagataatgtgcattcaacaggttttcttctgcacattggaagccacagagatcacaggaaaagactttctgcggcccatgagtatgtctgacatgctcatgaggagatgagctgctctctgctctgtggctacagtggcagcaggtccgttccttcccctcttccacatgacactccacatgcttttccaaagcagagcaagaggaaaatgaacagccacacacgccgcacctgagtcctgtctctacacttccaaagctacaactaatgctcctttcttctggaggaaaaggattgtgtctttcaggaacaagggaaaccatttcccgagcaggctttttcacttcatctactttcagaggaagaatattagatgtgctaaaatcacaagatggggagaaaacactgggaagagcgctgcctccttctgagcagtttgctggaaaggcctcctttcccatttcagccaaatggacattagcttccacagtgcccaacccacaggcaccctgctctcttgtctcaggctccagtgcctctgttctcagtcgcttggaagcacgctcacttctgtattcctccgcagcaacaccgtccgagttggacgactcggaaaaaactcttttgctcgtaaaattctcagagacatttgccatgtcatcagatacaggctcagaactgtcatcgcgggatgaaacactcctcggatcttttgctcccttaacactttcatcctcatcattgtcatgtttattctcagaatccattctcaataaagttctgatgatgtttcgtcgttagagttggatttaactggagtttacaacctgtgaaataaacagacatgctattaaagctttgaacaaagaaaatacaaaacgcttactctggacctgacggagaaaaacaagatgaaattaaccttcatacttgactgaatctgaccacaagtctaaagttctataggcaatcttgctgtgtgtggtggttcatacctgtaatcccaaaaaccaagacaagatgactgccttatgattaaggtcccaatctaggtgacacagtgactgccagtgccaagccaggctacaaaagagaaagaggagggggaagaagaagggaagtcagaggagaaggaggaagaggaggaggaggtggcagccgcagccacagccaaatccgtggaccactgctgactcacaaagcaatgctaagcaagcaccttggtgaggacatagggatgctctccatcagcttccaaaagttttcacgtttcaagactgaaatagtagattgcagctgacttctttttaaacaaagaagcctttcttttgaattgcattttggtgaactcccattctatcaaacagataaaaacaaaaccatcaatctgagtctagaggccttgccttccctgtgtggccactcaacaagaaccaaatgcacctgtgcctcttctcctaacgcaaagccttaggacctcagtgacaccatccacacatatatagtcacacatatatagtcacacatatatagtcacaggtcaccatttatcccagtgacaccatccatacatatatagtcgcaggtcaccatttatcccagtgacaccatccatacatatatagtcacaggtcaccatttatcccagtgacaccatccacacatatatagtcacaggtcaccatttatcccagtgacaccatccatacatatatagtcacaggtcaccatttatcccagtgacaccatccatacatatatagtcacaggtcaccatttatcccagtgacaccatccatacatatatagtcgcaggtcaccatttatcccagtgacaccatacatacatatataatcacaggtcaccatttatcccagtgacaccatccatacatatatagtcacaggtcaccatttatcccagtgacaccatccatacatatatagtcgcaggtcaccatttatcccagtgacaccatccacacatatatagtcgcaggtcaccatttatcccagtgacaccatccacacatatatagtcgcaggtcaccatttatcccagtgacaccatccatacatatatagtcgcaggtcaccatttatcccagtgacaccatccatacatatatagtcgcaggtcaccatttatcccagtgacaccatccatacatatatagtcgcaggtcaccatttatcccagtgacaccatccatacatatatagtcgcaggtcaccatttatcccagtgacaccatccacacatatatagtcacaggtcaccatttatcccagtgacaccatccatacatatatagtcaacaggtcaccatttatcccagtgacaccatacatatataatcacaggtcaccatttatcccagtgacaccatccatacatatatagtcaacaggtcaccatttatcccagtgacaccatccatacatatatagtcacaggtcaccatttatcccagtgacaccatccatacatatatagtcacgggtcaccatttatcccagtgacaccatacatacatatatagtcaacaggtcaccatttatcccagtgacaccatacatatataatcacaggtcaccatttatcccagtgacaccatccatacatatatagtcacgggtcaccatttatcccagtgacaccatacatacatatatagtcaacaggtcaccatttatcccagtgacaccatacatatataatcacaggtcaccatttatcccagtgacaccatccatacatatatagtcacaggtcaccatttatcccagtgacaccatacatacatatatagtcacaggtcaccatttatcccagtgacaccatacatacatatatagtcacaggtcaccatttatcccagtgacaccatacatacatatatagtcaacaggtcaccatttatcccaatgacaccatacatacatagtcacaggtcaccatttatcccaagtctttgccatgaaaggccctcctcttccaggtggcaaccaactttcttatctcacagtcattttcctgttgtctgaagataaatggtaaagggaaatgtcagtgggacaaaattaatggattaagtgttggagaagggaattattctgaataaaatgccttaaaatcaataccattgattttatttttcattatgatagttaattaaattaacacatatcattttctatttattttatactatgattgaaatttttagtcaaatgtgattttatttgatgttagtaaaaagtcatcgatatattatggtctcaaatataatgacatttttaactacttagctaccttttccataaatgacaaataaaaataaaacctaacttacttaaaagtagaaaacaaaaataatatctaaggtaaaaaataatatctaagacaagaatcagataaataaataatagaagaaaaagtcagacattttttctaaattaaaagcctccaaggatactatgctataaaggtcaccaattagaaagtgcaacaagacctctggaacacgactgtttttttaatcatatatttgataaaacatttgctcctagactattcaaagaactcttaaaacaattccaaaataaacaaagaatctgttataaatttctccaagggaaatataaaaatggccaaaagcatatgaaattaaaataataataataataataataataatacatcattagcccttagagaaatgcagtcgggaccacatgagatgctgctttccagcttctagaacagctaagaacaaagtcagaccgcggtgaaactcagtcacaggagcctaaagcacagcccgatggccatttgagtgaagcaaggccagtctgagcagcacagcaggactctgtcttacaaaacagaaaaagctaatcacaacaaatgttaatggggatatggagcaaccagaaccttcccacactgctagtggaggtaggagaaaaacaaagaagctcaggtatccagagggtgcttcacaaatatccttgtcaagatacaagctcagagttggcaaaaatggctcagcagttaaaagcacttggcatcaaacctaaataccaagcttgcaaaccatatgataggaaagaaataccatcattctcgaaaaattgtccctctgacgtccagaggctgtgacacacaagtgcgtggacaagtactattaaaaagtggagacaaggaggcttctctcgggtgcctcttgcccgttgctccctctctctccctattcccttccccctctcttcatgtgggcatggctggcctctacttctctactcctttctctgcctttctctgcctctactgccctctcaacttcttaactcccctccccatgccctaaataaactctactatatactaaaaaaaaaaaaaaagaaaagaaaaaaaaaaaaaaaagaggcaggatagtggtcgtgcacacccttaattccagaactcgggaggcagaagcagacttatctccgtgccagcatggtctacagagtaagctccagcacagccaagggctacatagtaagacctggtctcagggaaatgggggggaagggggtctggccacatttgctcaggaaggtgctcttggccacacttatatccccttgactgctgagtatacaacggcatagatacaacagaactctgctgatgggcatctgatctatttctttttgttgctattctgactaaaaatcttgtcagcattcttatacatgttttttcacaaatacggttttcatttaagtaaatacttagggcagatctaactttatgagaaactgactgatttcaaagtaatagtactaaactgccacatgtcatgtgtgagatccccccaggaatataggtccatcttttaaattcagccatgctagtgtgtgtgtacagcagtgacagctcatgtgctttgttggtcttctgctcatttcttaagttggttctttctttttcttattgaacagcagaattttcacatgaattgcaaatgtgaactcaactgtcagatatgctctatactattttatcccttttcattttaattattttttcattttattattcatcttttattttattatattttatataaaagaatctttaaactttgatgaaatcaatacctttcctgtaatggttatttgtgcatatgattatctgtttcttcaatgcttgaatgtaaaccatggtttattttattcacccatatattcccaaagacccacagcatttcaggtacttatatactactaaaatgaatagtggcacgcacctttaaacctggtacttgagaggcaaaagcaggaggatctctgtgagttcaaggacagtgtggtctatatggtgagttccaggacaaccagcgctatacaataagactcaatagttagataggtagactgacaaataggcaggcaggcaggcaggcaggcaggcagacagacagacagacagacagacagacagagtaagtgcattcctccttgtcatataaaataagtcttgtacccagacatttaaaaacgaaataaacaatgtctaggacatacttcaaaaacatccaggtgaggactataaagcaagctgctggtggttatttaaaagtgagtaaaggcacacagagattcattttctcattctagcaacagcacaccaaagaacagatggatgtgtgttcagagtgcatattctgttgcaggcacaagtataatgcagacagtggcaaaacaatgaaattcttaattatattctatacaatgatttaaaaagccctaaaacaaagaggaaaagtattataacatttgctgtttttaaattgctttttaggttaacgaaattattcaacatctcattacatgaaaataacaaaacacctaacagcacacacacacacacacagagtgtccaccatatcaaactattccacaatggcacaaattcattatctattggaacattttctactggaatgtacctgctgtatataaagtcacatatgatggtgaagatataaagtaaaataaatgagcaaaaatcatacatgctacgtagaaagaacattaatagtttatctaaatctttcaggaaactaaatctgcctgaagttggggagatcaaagtttactactttgaattaggtttgaatattgttgctttgctgagaaagtagatagaaacagttaaaagcttgattggccaaagatggtaacaaatgtatggagcatggaggacagacagctctgcacaggccagctttccaccacatggcagtgtacagaacaggcagctgatcaacccatcccagatcacagccaccatttctgaaaaaactaacactcaaggtcagcactggagccaggggccatctagaggcacaagagtttgccgtagtctttaagttataaagtctattatggaaacagagtgggcaggaatgcatagtggttttaataagtactttaaagtgatgtaaaaaggattaaacggaaatgagagtttatgctaatataggctttaaaaattcattagaaaggttattagaacaagtatcccattcccagtagagatgggaacaagagcatcctctttcttcttgaaagattcaaagatcacctgaatacaaccattaaaggctcatttttctgaagcagattttattcattcatacaacaaacacttactaaaaacttactattatctgaaagcaccctcatccttccagcaacaaagtaaaaacaacataatctccttcttgacacactgtcatttgtatcttagaagtcttccctcagcagaggttcaagactgaaacacctagtatgtatgtggactaaagcagtggaaccaggcccagggagatggcttagtggacacctgctgccaagccagacatgctcacagagtgcaatctctggaacccacatggtgaggggaggaaacggaatcccacatgttggcatacttttttttaagcagcagaatgtatcactaaagccaatcctcttcaagcactgtgtttccgagaccaagtcatgaattaccatccacacagactgtcgcaaacaattacaagcatgtacattggggctgagtgtggcttagttgtgtagcacttgcctaacatgagcaatgttctgagcccaatcacacacacacacacacacacacacacacacttttaggcatttgttcctggctgtaaaaataagttatatataacacttttttattaatttcatcttacctataattactaataaagttaatagcacccagaaactaacaaaaattaaagtatctaacttagacattcctcatgttttaagggaaaaatactctggagaaaaggaaaagaaaagaaaagaaaagaaaagaaaagaaaagaaaagaaaagaaaagaaaagaaaagaaaagaaaagccttttaaagagcaaaactaaagcacatcaatagcagccttctgatgacacctggtggccgcttctcccacaatatcttgcagggatttggaaaaagcatttcaggaagcaggctttcaagtgctcactgcccctcaggcagaacacctgatgtcctcctggcctcctcactagccttgttcacttgtcactcattccaagtacgagtcttcatttctctgtgtcttttgtcttctcggtggggtatcatagtgacaactcagcccttccgcttccactgagtcactcacacagaaacatacaggctgggcaagagcccattgtctccgtacccctagtctcagtcccttaccccctcacccttcctgtacacacacatgcacagaaattaacagtctcaccacctttccccttgagaaattcaaaacagcataagccctagaagttattatcctacaaagggttctttcctcctgcaacacaaggccagacatataactaagagctgcagcagccacggctgagtagaatacaggaaagttcactctccccatctgccatttcaaactggatttcctgctgaacctatatcatgatggtgtcacctaccctaatttcaagtccactcctagagtctgtctatgaaagccttctactgctgatgtgcagtctcaggaaactagaggtgctaggagtgcccagcccttccagctaggcctctcctatcagaaacatcaatttgggaaagagttcacaaaatacagtctctgattctacaaggcaaaagaatactcttccaggaaaatccttataattgagttataaagttgaatgaataattctgtcaagaatatatttaacaaactaaaatacatttactagataactctggggcaatttttaataaatgggcatacgagaacctgctttaatcacacagaactagttcatgaatacttgggttccaacaactctacctcctcactgtcctaagagagtacaacacaattcctcaattataaatacatgaagctctttataaaattgcccaagaatgtgtctgataggtttaaatgaacctacaaattgtttgatactatttcaaaaggcttagttccctttcgtatggtgaacatagtgaactgcatctataaaagcaagaacactaagagtgtattctacctagactccgtcccaaagcagtcatgtctcccctgtcctctgccctgtcacctacactgtactcctgccccagcaaagattagaatcaccatcacgggtgctgagtctaggtggacatggggccgctccaggatggagatcttggacagtcaattacccgggtaccccgacaccacctgcaggactcagcttgatggcagtagactctgagactggcaggaaagttaagttgctcctccagtccctcttagcaagaacactaagagtatattctacctagactcagtcccaaagcagtcatgcttcccacctgccctcccccaaggatcaagacttcagggagtaccaacaggatacagcaagaacacctgtgcagactatacagcctggcagaggtccataggcaaaaatgttagacctcttccccaaagttagtgaaaaaatagaggctccctcaaattgccaagaaattatcttagtatcaggccatctaccctgagtcattagacctttggatgacaactcctacaaaaatcttacggtagccacagaagagacctaaaaccagagctacctagccaagctcactccctaatactcaacccacaggaagagcaggataatacagtgatatcttggttatgggcaatagataactaacataaagctattctctgtttgacttctcaagtgaagatgtggctcaggagcacagctccttcactggcgtttgtctgtctgccttcctagaggctcctgctgtagcacagtacactgaggcaccccggagaaggtcctaacggtctcagccacatgaagcaccttaccagggcagaagtccttgccacttactttagaagtataataaaatgacactgacatttatctctcctactaccaaaaatgagatctgctatcctttataaccaaaaacttaactaaatcaagagttactaaagaatcacctaatgaatggatgaggtagagaaactttaagtttcagatgcatatagcataaaggaagtatatatccttgctatatcctgaaaaatacattcatagggtgggggtggcatcattctgcctctggaatctactgagccaacagcctgcctcagagataccagcagtaggaattcctttctagttagactcagaaatttagcattcccaaactggaggagcagttcacatggggaatacaggccatacatagtccattggttactgtcactacacaattaactctaaacctactgatattggaaagcattcaagcttaggggatatagagtcactcgttcagcatacagcctgtgaaagtgctaccactaacatatcagacatgccatttctagctctatacaaggaggaggaggaggaggaggaggaggaggaggaagaggaggaggaggnnnnnnnnnnnnnnnnnnnnnnnnnnnnnnnnnnnnngaggaggaggaagaggaggaggaggaggaggaggaggcaatgaggacgactccagaactggaaagatgaatcaaggacccaagtttacttcctagaacccacatcaagtgggtcaaacccaacatcacacagctccaactgcaaggagtccagtacctctaccctctgcataaactccaactgcaaggagtccagtacctctaccctctgcataaaccttggtgcacaaacccacattcagacacacctacatatacataatttaaaaataataaaaataaatcttcagctgggcaatggtggtgcacacctttaatcccagcactcgggaggcagaggctggcggatttctgagttcgaggccagcctggttatagagttagttccagaacagccagggctatacagagaaaccctgtcttgaaaaaaacaaataaaaaaatagaaaataacaaaataaaaaaacaatcttcaaagaaccttctccagatagaatctaagaacatttaaagatatgcaggctagaaccgcatactcccaagtctaggaatcagaagaaactagaattctcacccaaattaaaccagaattttatttctattccagaggaaaaccacgtaaatatttcaatatctaattcaattttgcgtgcaagttaaaaatccaaacatttgtttagtgcttaatatagaattaaaacaatattgaaatgccataatgatgaggatcaaagctcagtgacaaaactgagcagatccaccagcatcctaaacccccatccttagacgactgcctatggagagggactgccgcagtctaatcacttggttagcaaatactactctatcagcccagccctcacaccgcccttggctaccccttcccatctgaagcactactttctaaatacactaaaacaacccagtcattaaattaactttatgataactttatattgactatccctgacaaatgcttcacactcggaaaaattctccacaaaaagttaaaatttaatctatcttttttaaaggcatttttaaaatcaatactttggtaatatttccatctaatttttaagaaaagaaattattgggtcagaaataaaagagataaggtaaaggcgtgatgactgagtaaaaaatgagaaaacttcagtgtcgttaaaatcccgagttagcagtgtctcatggtatctgaaaaggttgttttattatcagtgtaactaatcacaatgaaaccatctcttacaactaaagacattataatgaattttctttacagctacagagaaatgggatttgctgtttcacatcaactagaacaggctgtataaattcttcttcctatttattgtaaaatataatttcatctataaaatcagtcatgaaatattaaaactgaaacaacagaatttatgtcctttacttaatttagtttaaacggtctattcactaaaaacaggggtagggaggttaaatttgatggagcccctctttcctcattaagtgtttccattagaccctggattttcaagaatttataatgcaaccactttaaaaaaaaatcattccatgaaaaaagttagactatgttccttaaatcctcccttcttctctttcaaaagcaagatgaagcatatcatgtatgaatgctgaggagagtggaagacatagcagcacaaaactaaagaaacactacagtgaaatgtgtaacactcatgaaaaagaacactaggctacaaagaggtctttgcttttatctcaactgtgccaagtcagctggaagacacagggcagtttcagcttccttgttgtagcacaagaaggaaggactaagattcttaaattcaatcaaaaatcccttgccaagatggacctctaagcactcagacactatattctcagtaatagttttgtttctaattgaagcagaagaataggaaaatgagattttgaaaatataaatctgaagaactataccaaaaacaaaagcgacagagggaaagaaggactgtaacactgctcttgcttaaacctgtcaggtctgggagaagagatggagcacaaaggactgcaggggaaaagactggaactactaattttggaagaaatctggaaaacactgtaattccagatgtcaataagctaacacaccatataaaactatcaagcctcaagacatttggaatataaattattaggtaccaaagatctaagtgttaagaaagtatatttagaaagtagaaaatgttcagcattaaatttttaaatgaatatagttctactcaagtccatttatataataaggttaatttttttcctctcagtggtgaaattataggtaattcttttctccaaatcctggcgttttttttctatactttccaaaatatcctttaggaaaggagttgattaaatgttaagtttaagaaaaaaaaagttgcttcccatcattgaaataatagaaaatgatgagtgcaatcaaaagaatacaaatacaagcagtcagggtaacataattatagtcagagacatttgagatctcagcctggtcaaacagcaagaacaccagacactaagaaagctatctatggctcccaggatctcatattaaacatgcaacatagagagttggtgttggctggaggagaaccaataacacctcatgaacactaggtgcccattctccactcaacagaacccagctgactccaggatgaacctgtcaaaaacctgttattttggtcaaaaagaagggagatgctttaaaagaaaaatgttaggaagacatagaagcaagaataagcactatcaacttgttaaaaatcttagtgaacaatgcatttcaatgacttgacaaaagatggatggatggatggatggatggatggatggatggatggatggatgaaaaactggataagaaactgatagataaggcagatttagtaaatctaagagggaaggcaaggggacctaaaggtcagctagctccctttaggatacagggacaatgggcaaacacaaaagagtactacaaagagaaagttatattgacaaaaaatgtatcagacaagattcatcaatagaactaagcctgagaaaatatttatatggaacattacatttctatgaatgtttctgtacgtttgcatgatgtttaaactgtcactccacaaccactgattagttccaaggtaagaaaataaaatataatttagtaattgtgaagtggaaaaaaaaataaaaggtactatcttggttgggtgatcaaaatcaagcatccttggtggagggcagacggacaccatgtacccaagctgtggcatcatgatagcctcacatcacccatgcttcacatcagccaagaatgcaaagcctctgactaagagaaaacaacaaaaaagcacaacctcaggagtgttctgtttaaagaaacaagatggcgagaaagcctacctagcagcttcaaaaccccattgtcatgaaagacagattatggaaagaggctaaggagacatgaagactagaccctgtgctgccaatgataaatgtaataaagacattgatgtcaactcacaacaactgtctgtacacttacaaaactgataggactactgtggtaatataaaaaggcatctctgttagatttctcgtgatttggtttggcttttttgaggcagggtctcattatgtaggcatagctagctaggaactcctaaagatcctcctgcttctgcctctcaaaatgctggttttagaggaaagcagcatcttaacagtaagaacaagtcagttcttaagaggttatcgactgattgttcctgagcagagagttacgatacatacacatgtggggctggatttagacacacacagaggaggaacatgtgtatatgaagactagatgtctaggaaaaaacacatgagagaacaggaaggcaggaccagagatgtcactcagtgatacaggatctgtcctgtacatgtaaggcctggattttctctccaacagagcaaagcagagggagggagtacaacctgacaacagataaatctctgtaaaagttacacagacaggtatcctagaaacttttctgggtttattctcacattttcctattaaatttagaatagttctcaaataaaaactaaaatgtattagaattttaatccatcaaaagtcttattcacttttctctaaaagctgagttctgactatttatttatttatttatttatttatttattttggtttttcgagacagggtttctctgtatagtcctggctgtcctggaactcactttgtagaccaggctggcttcaaactcagaaatctgccagcctctgcctcctgagtgctgggattaaaggcgtgcaccaccatgcccggcttttttttttttttttaattagataatttctttatttacatttcaaatgttatnnnnnnnnnnnnnnnnnnnnnnnnnnnnnnnnnnnnnnnnnnnnnnnnnnnnnnnnnnnnnnnnnnnnnnnnnnnnnnnnnnnnnnnnnnnnnnnnnnnnnnnnnnnnnnnnnnnnnnnnnnnnnnnnnnnnnnnnnnnnnnnnnnnnnnnnnnnnnnnnnnnnnnnnnnnnnnnnnnnnnnnnnnnnnnnnnnnnnnnnnnnnnnnnnnnnnnnnnnnnnnnnnnnnnnnnnnnnnnnnnnnnnnnnnnnnnnnnnnnnnnnnnnnnnnnnnnnnnnnnnnnnnnnnnnnnnnnnnnnnnnnnnnnnnnnnnnnnnnnnnnnnnnnnnnnnnnnnnnnnnnnnnnnnnnnnnnnnnnnnnnnnnnnnnnnnnnnnnnnnnnnnnnnnnnnnnnnnnnnnnnnnnnnnnnnnnnnnnnnnnnnnnnnnnnnnnnnnnnnnnnnnnnnnnnnnnnnnnnnnnnnnnnnnnnnnnnnnnnnncatttattttactttatatcttcaccatcatatgtgactttatatacagcaggtacattccagtagaaaatgttccaatagataatgaatttgtgccattgtggaatagtttgatatggtggacactctgtgtgtgtgtgtgtgtgctgttaggtgttttgttattttcatgtaatgagatgttgaataatttcgttaacctaaaaagcaatttaaaaacagcaaatgttataatacttttcctctttgttttagggctttttaaatcattgtatagaatataattaagaatttcattgttttgccactgtctgcattatacttgtgcctgcaacagaatatgcactctgaacacacatccatctgttctttggtgtgctgttgctagaataaggagggagggagggagagaaagagagaacaatcatttgagttcaatgcagtggagttcagtcagctcagaatggagtaagttgagttccattcagtcagtgcagtggagttgagtttgttagtttgtaagttaagttcatgcagtttcagtcagagcagacagttttagcaggataattttagagagacagtttgcaggtgaagacaaaacaagccagaaaatgagaaggagccagaagattagaacaaattgccagagttagtttgaggccaagcagagcaattcagaagccaaaaaaacccagattgaattagtcaacttggagaggagtttgggccagaatatctgaattaaaccagccactcagagaaaactagaaaggatgagtttattcagcagtaagcctctgaaaagacatgtctggcaaataagttacttttacactaaaaaaaaatgagaatggaagaacggagtaactttatacacatgacatatagaactttttacacataaaaagtaaaataatgctttaaaaaacttcaattgggagggaaggtagaggggacttttgggatagcatttgaaatgtaaatgaaaatatccaataaaaagaagaaaaacaacttcaattgataataggggacaattggtaatagaggacaattgatgatagcgatgcttttagaggacaatggtaagcattgacttacagcaagactcagacttaaataaaggactgggagactaaaactgaaccaatgaaaaacaccaccagtcagttctcatactaaagagaacaatcactcttaaggactaccctagtttggttcctagcagccagggatcacagcaacttgtaacctcttagctctgcaagtatctgcattatgaacacaggcacactcacacagtaacgggttaggtacaaagcccaaatagacctttatctggatgtatttgcttctgtcttctggcatcaataccaatccatcctttacaagcatagctagtgagcaaagatatgaaatcccggagacgtggaattaagaaagcctattctgcagcggaaacctatacttcccaagtgttctctgggtggaacctaggagctttactcaggaaccagagccctagaactaactcctcagagagaggggcagggaatacacattaatgcttaagtactaaaccctagaactgtaaaggagtagtgtgttgacagtaacagccaatcaaacaccataatgaacatatttacacaaaactataccacacaggtctccaaagatacttgtctgaaccataatttgctatacaaaattacttccaatgtcacgcttttagcaagcattgccctcgtatcacaataaatacataaaagatagcagatgccatttctgaaggctcttaatgaaaacccttgctctcattttagagagactgtcatttctatttccttccttcaatgacctaaaatttctaagctatttttaaaactgcattaccaccttactttaaattctaatggtcttataattatattttaaattagcatgcactcctttaactgatattcttcattgaaaaataattgatccaatatagctcagactctgctccacaagtcacaatcagcagaaagcactaatgaactgtgtacttccaagacgtggctgctactgttcctagagttcaaccccacagctccggttccagctatcagggttcttctcgctatgtaacgattactatctgcagagcaggctgagcttgagttacacttgatgattaaaccactgccactcagcctgaattcctccttccctaccatgcttctaatcaccttacctagctttatttaaaaccatttcttaaaaaaaaaaaaaaaaaaaaaagatgcactgtctaagaggaaacaacagagaagtataaacagcaaacacactgctaagtattcggaacgagagcatggagcctctctggccttcacaaatgccgaccagacaagagcctgagtacctaaaactgctgcttctaaagcctgacatagacctccatgtactctacttgtacctatatgtgcctgcatatagactctacatacacctacgagggatcacctgtgatcactgtgtcttaaatgcagaccactctgtcatggaaggtctcccatggtctgtcaccttcctgataagagactgagtctgtcagaaactataacatccccaaactgaaaatgcttgacagatctcaagatactgacaacttttgcactttggttatcaaacagaaacagtagtagtatgctgaaaaacacagttctcttcttccacagacctttccaagcagtggcagtgaggccatgccagtttaacttcatggtttaactgatggttataaaacaaaattccaggtgtggattttaatatgacaaaggaaatcaaggctatcaaaatcaagggggaaaactggcaagtgttgttttcccaaaatggccccttttcttaacaaactgtctacacaaaagtagattaacacaagcaacccagacagaaaagctgaggaagtctgccatctgctagactgctctgaaagcaaacccacaaaggtaaagagtcactttgaaaggaatgaggaccagccctcgacagtctccctgtggactcagtccttcctatcttgacctgacttttgtttggtttgtctacctgtgtatgatttttttttcctttaaatctacatggcattgaacagttggatagctcacccctttgtaaccctgcccatgggcaaactgtgtctaaggcaggggatataaggcaaccagagggttcctataaggaaaatcagttgtttaatggcacataaacttggcagtaatgtgctcacaccagtacctgaaacagagtaagtgctcagaaaaattaaccatcaaaatcatcaaaaccagttttcttgacagcacttctgagtggagatttttcacacttcaagatcacattttcatctccagcttacctttttcatataaacgtaaacagtactctcacagacaggcatgcaagtcagaaataatctaagacctgaagcacgaccaatttaagaacacaatgtgttaccactgagtccttccatggagagcttctctctccattttgctcttaccacaaaatgtaactaacttgactcttttttgtctttgggttttttggtgtttccttttttggtgctgagtatggatccaatgtattgcatatgctagacaaacacaacccagaaagctacatcccaaaccttactgcttttcattaattatgtccatactctcaacaataatgcaactttgttctatgtttctgaactttaaaaagttaggacaggggagaatacaatatacagccttctacatttactaagtttcccctctatatttatgttcctttagtttgagagggtcttccctctatggtggtcaaggttatcaagatagtaaagtgtggctagtctcaatcctctcaggctccagagcagctgggattgcagcgcacaacaccctcggctaaggcgctcctttagtactagtctccaggcactcaggtaaatttccctggggcaatgtttttcaaacattaccatttaccaccacagggtttaaaggcccaaacctttagccaagcacttcaggcagacagagatctctgtgagtttgaggtcagactggtctgcatgccagttccaggccagtcagggctatacagtaagatccagtcttgctgggcggtgctggtgcacacctttaatcccagcactcgggaggcagaggcaggcggatttctgagttggaggccagcctggtctacaaagtgagttccaggacagccagggctacacagagaaaccctgtctttggggaggggggggggggatccagtctcaaacaaacaaacaaaaagtcatcaaatctccatgggtgctggaaaatgtcttagcaccactgtgaagggaagactaagagcagtaatgtgaacactcaggtgctggaggtgggatttcaagttcaaggtcagtcaaggctacaaggcaagatattatttgcagaaacaacaaagactagggagaatgaatgaattggagagcatgcagccccatcactaccagttcacactcactccttgccttacctaagtgttgttttctgcctcccaacaacactgtcaggccttttacattgttgccaacctaatgtacaaattacacaccaggggctggagagatggctcagcagttaagagcactggctgttcttccagaggtcctgagttcaattcccagcaaccacatggtggctcacaaccatctgtaatgggatctgatgccctcttctagcctgcagcatatatacacacagaatactcatacataaaaatttttttttaaaaattacacaacagtttggtgttcctagttgatactaaccaacatttttacatccatgctttatgtgtggtgggggagagaatgggcacgtatgtgtagaggctagacagcaacttggaagtcagttctcaccttccacctagttctgctactgggttgttttctgggctagccagcctgcaagcttactagcagttctcctgtcgagctcactgtaggagactgggattgcagacgtgcaccggcttgccctgatttttaacacaggctcatcaggcttccacagatatcactttcacctgccatctccccagctctggtttcctactcttattgacatgtactgcttgcccattgggatagtttaagccttttgccagtcatatgtgctgacacattcaattctgtctgatcacttctggatgggtctacttcatataccagcatccatcattcaatactgtcaagcatactctttccccttataccttttgtgattgattcaaaaatctcaatcagtcatacaattattgccctgaattatcttctaaacattttatagtctcaccttcaatatttaagtcttttattaacctgtacatgaccgtttctaattgtataggttagatatatcccatgataaataagatcctatttactaataagcacatatataaacaactataattttaaggtttgaaagtagtgttaagtgagcctgaaaggctcttgacaatttgagccctgcttctgaccactgtatttcccagggctctggtcagctacactgacagtctcctagaatatcctgccctctttgagggtatcatgtaccccacaagtctccttcctaactcctgccataaaatgaacctaccccctctcgggctctaccatacattacaacaatatgtttgataacatattgactatagactctctgggagaaaaatgtctataatcagacacctaagaacttaacagttaaaaacaaagttgttagatgagtaaatgttcaaatgttatggaagtcaatgtgctggcttagtgacgacaaataggggctgtgtagtcacacgaccttgactggaatcccagcaacaccatttaagaggtataccaactgcttaccctaaactgagtgccccatagttgataaaatgtagtacacagttcagagaatatactggagactaaatgagattatgaatagtgtttatacaaactaaaagctcaaaacattgttatttccattgaatactatgttttttattaccttttattacttcttagtaccaagtccttagtatttcagaaacttctaattctctggggtacacacaagaaggccaaattattaaaaagtaacattacatgagaaaataaccatgtacataaaagcaataatgctagagaggagaaatgaagcctcctgttggggaccgtccatccatgcccccccccccgccatgtctccccaagattcctcctccagagccacacgtaggaaagttctggatgcacttatagaaaactgtaaattcctttatactttgatatggccaccaacttctgtcttctttgcagcaatatcttggttataatgtaggtacttataatggataaacagagcttttggaagcacaatctgattataatagggagacagtatagttggaaaataacaaaaaataaagtcacttttcaccaaaagaaatctttaataaagatatatacacataagatatgggctgtgttatatttgaatctggaatgtccccatatgctcattcttacctcttagtgccaacttgtggccttattttgaaacttattaatcctttaggaagtagagactattgggaaaagatcacctggagcagacctttcaaaattatacctttgattcaaacctttctctgcttcctggtccacagcacgagccccgtactgccatgtgctccaccactctgcctcacttccttcctgctcccatgggccacccactggcggtagtggaagagaaaggatatgggggaagtggacctgtttaaaaatggttcttttaagcaactcccatgtgtgttgtctggaaatccgtagtttagttcacaggtaagtaatggcagctgtgttgtgaactccaccatgctttctttcctttcagtgacctgaaacaatgagctaataaagttcttctctgggaggcttctgtcagttattttgtaaaagtaactaacacacactcacaaaatctctagaatgttacatagtaacaggaggttttcctgggacatttaaaaaccagaatgttaccagaaatgcagagagtaaagacttcattcctgacctagcagaggagagcatgtatcctattgggtattagactagaggccattcttgttatgttccggcaacaacataacaagaatgttatgttgtttgcccatctcagcaatgctcaattcaaaagcaatggactgggctcgagagatggctcaggattaggcgccgactgctcttccagaggtcctgagtttaaatcccagcaaccacattgtggctcacaaccacccataatgagatctgatgccctcttctggtgtgtctgaagtcagctacagtgtatttatatataataaataaatatttttttaaaaaaagaatttctataaaagtaatggactaatttacatttaaggaagaagatttcaagacatcatagcatacttttaacctgatttacagtgaggacaaaacaaaaaaaaaaacagtacaaggatttgaaaagcaggcagaggggtaagaacacctttcaagttgtgaacaaaacaaagacagaaaatactataatcattaaagagatcaactgtcagagagaagcaggacagggtacactgtgactgtctacagttcgcctcactagtaagacactcgctagtaaaggaataagtgggaggcatggccttgttgaaaagcctactttttaatgaggggtttaaatgtttttaacctcttctagtccaccacccactggcggtagtggaagagaaaggatatgggggaagtggacctgtttagaaatggttctttcaagcaactcccatgtgtgttgtctggaaatccgcagtttagttcacaggtaagtaacggcagctcaatccactgatacagccgtagtttagcgcagcagtcttgggatactagtagccatggcacaacttagcaggaacggccaggcttcaggcaaatcagcacaaggcggtaggaaagaaggtctctgctgtgtctcagcaaaactaagagcagtgaagaccggagaccaagaagcatttagctaggtaaacaagccgagctcagcctcagtccctgcccactgagcctacttctactccctccaaacaccacgggtcctccacaggcctcgtctcagcacctgagtctgtctcagtgggcatcactctgttaatcagtctgagtgcgaggaagcagcagcaaactgtagcacatcaccaccacctcaagttttttggaaagtttctctctaagcagtcctgacaaatggagttcaactatgaaatgtgaagcataccaatacatgtatgtcattagcaaagaatccttcatgtgtcctttcacgtgcttgttttacagtaccacctttcacctgtgcctgcttcagctaaacattccttcataagtcagcctttgcaaaacaccatctaacacaactgactttccaaagaaccctcaagtttccactttggaggcgtcactgcagataggctttgaggtttcaaaaccccaaaccaagcctggtcttgctctctttctgcctagagcttgcagatctcggataagcatgcatgcatgcatgctgccatcatgggctggaagtcgtgatgatcacagactaactctctaaaactataagcccctaattaaacggtttcttttataagctgccactgtgtctcttcacggcaaaagaactgtaactatgacagtatggcaccaagaaaatgccatgacagttgctgctaaaagcagagaactcaggattcctatacctacccaaaaactacaacacagagaactaaaggtcccactacctggggcctgtacaagccatggaacgatggcaggtaccacgtgttgccgcctgactcaatactttgcatatgttcaaatgctgaagtacgcacagaagctgtaaagatcagccagcacctgaaacgccacttctcctggcttcaccagtttttaagtccagcaaaataagaagtaacaaattgtgttaagcttttttactttggaaattaccctcctattttaaaggaattcattgctgtgagaactgtgccaaagaaaatatactgtctctctctctagtccctagaaacaagggtagtttggccaactttatgtcctcacttagaactttaaacatcacaaaaatgcacaggcagaaaaaggttcttctcctgtggcaagaaggacttcagtctatcaacaaaggtagcaactttctccagtagtgactctgtcaacaacaaaattctaaccaggctacatatgggatggagcttgtgctaggactccaaacacatttctccagcctgcccctttaattctgagagctatctactatattctagggcgtgcctttctgtttaagtcaggcaaaacccatccttacagttgacagccaagaactgagtggcaccacagaccttgccccttggagaatgctgtatcaacactagattgtactgccaatgccattagtagcctagtcctccactacccacccatcagttcacttagtgcaatggctggcacagagcaagcacgccatgtagagttctctgtatgaactgcacagcagggaagacagctttgtgttgaccccccaccttgcattcagcaacacccactgtcgctgacactgactatcaaagaaccactcggagctgcacagcttcactcattcatcagcttttatactgggattctttccatcacctaattaggaaaaaactttcttacaggagagaaaaaaaattaggattctatgtcagcagggttctccttcagttaagataagccatcctttagggaaaactgtcctttgacaaagtacctaatacctactaacccttgccaccaaactcaaatgctattttctgcaaggtttcaccactccaacaggcaagtaggtataagttcctctgtacttccagatctctgttctagcacatttcttaaaatagccgtctcctaaaccagatctcaaaaatcaccttttccagcacctagaacgatggctgccacagacaggaagtgctgctttagaagtggaacaatgctttggtaccaaatccactctctgtactaccctgcaacttttctacaaatccaaaaaaagtttaaaaatgttttcttgggctgtagagatggctcagcagttaagagcactgactgcacttctgaaggtcctgagttcaaatcccagcaaccacatggtggctcacaatcatctgtaatgagatctgatgccctcttctggtgtgtctgaaggcagctacagtatacttacatataataataaatacaatctttaaaaaaatgttttctcaatataaataattttaatggaaccactgttgtaaacaattattatgcctgctataccagagtttgtacagagtttggcagtacaatctagtgttgatacggtattctctgagggcaagttggtacagtgcactcacagttcttgggtgtcaactatagtgatgggttttaactgacttaaaatcctatttgtaccaagacatagtgctaaacatttgaatgtgaacattcattttgttcaagttatttaacggatatttgtacgttgggagtaactgctactaaacaaggctgtcttgctttatgaactataaagagtatgtgcaactagcaggagttcgagtattttctaagcagtatcttgtttccaagtgagctaccatcccactaattaggtacctactatgactaaccctgtcaaatataggctaaagattatcactagagtcacatcattagatgtgaccgcccataagaaatcctcctctgtgtgtgtgtgtgtcctgtgtgtgtgtgtgtgtgtgtgtgtgtgtgtgtagtggtgtgatcagaccccagctccaccaaggagtcctattccagaactcttcacataaaccggccactcaaaacacaacacaaccaacaggggtcagcggctactgttcccaaggcccagcagactgatcagacagagcgagggaagcaccgccacccgatgnnnnnnnnnnnnnnnnnnnnnnnnnnnnnnnnnnnnnnnnnnnnnnnnnnnnnnnnnnnnnnnnnnnnnnnnnnnnnnnnnnnnnnnnnnnnnnnnnnnnnnnnnnnnnnnnnnnnnnnnnnnnnnnnnnnnnnnnnnnnnnnnnnnnnnnnnnnnnnnnnnnnnnnnnnnnnnnnnnnnnnnnnnnnnnnnnnnnnnnnnnnnnnnnnnnnnnnnnnnnnnnnnnnnnnnnnnnnnnnnnnnnnnnnnnnnnnnnnnnnnnnnnnnnnnnnnnnnnnnnnnnnnnnnnnnnnnnnnnnnnnnnnnnnnnnnnnnnnnnnnnnnnnnnnnnnnnnnnnnnnnnnnnnnnnnnnnnnnnnnnnnnnnnnnnnnnnnnnnnnnnnnnnnnnnnnnnnnnnnnnnnnnnnnnnnnnnnnnnnccgcgccgacgccgggccatccccgcccccggtaccccccgccccgccgggagaataactcacctgtttgtcggggaaatcgctcctgctcggccctctgactgactcctccggctcaccgtcttccctctgggaggaagaggcgggacttcctgcctctccgtcgagccacttccggcggttcccagggcgactacgctggatggagcacaggacaccataaccgaaatacaaaagatttcacgatcgccttggctaatgacctaacattcacgttctctgtttcccctcgaatggccggcggctctgcgtgtcgacttgttttcagcccagcggtactttccggaagtccctacgggagaaaacaggaagttccaccctccccgctggaagggaaacggaaagcctagagagtcaatctgtagggcagaagctgtctgggctcagtggcggccggttcttcgtcggaggacttgtcgtcttcccgaggatgctcaccggaaccgtccccgcagcaccccgcgccctgtctccatccctcgaacccgagggcggtgctgggaagggcaggggcggggcctgcgctagggccttcctctgcatcgggggccccccaggagtcggcctagagcctctggggttctcatgcgaagatcgtgagtgtccaggcgctaccctagttcatgaaaacagggaatccaacgacaccagaatggggtctcccaggtgttcgccgcagggagggagccgcgaatctcgtggttcctgagaataatgttgaattttcgtggcgattcacgtatccgcggttgggaattacaatccaagagaatcaaataaccatttccaagattacacagctagcaaaagtgaaacgtaactctaaactcaagagtcaacctttcctagtctatattgctgactcatatatatcatggccaaaatcactttacacgtctcatcttaaagagtagagtggactgggtaggatgtggcgctctagtagtccctggctcttaaataattcccacagtgtctacagttaggagagtgggaacaggacgggtacataagctaaataataattacaacggaagggactgggtggtgatgtcacacgcctttaatctcagcactccagcagggcggcggatctctggactaccaagtgagttgcatccagaattgcacagagaaaccctggctcccaaaagcaattgaataaataaaataaggaagggatgggtgtgaataggaagctatatcctttttcctgtaacaaagtgctagaacacttaacggaagcaatttaaagggttttttggtttttttgtttctttgtttttatctattttggctcacagtatacacagtatatatacattgacacagagtatacatttctatgctggggaaggaatgggtagtggcttcctcagtggttaacagaaaattgtaacagtcagctgctactcttgggcagatcgggaaacaaacctcaggcaggaaccagaggtgattataaatttcaagagaactcctttctgctccatatctcaaaagtcccacaatctcttccaagcccttccgagaacagcctgggaagaggtgacctagcatatgaactgttgaggattatttccgactccggccataacaggagtcaacattaagttaccacaacatcataggattgaattcatctttgcacccgtgtgattttcagggaggtaaaactaagtgcagggacaaagtgattggcattatctgaagatttaagtctagagacataaattgggctctggtggtgcatgcctttaatcctagcacttgagaggcagagacaggcagatctcttgagttcaaggtcagatcagcaggtcaatgatagagcacgtgtgtgaggtgtgaggccctgagcttgctccccaacatgtcacacatgccaaagtcaggatgtggtatgacaccagtataacacaaggaggccatttcctggtgagaaacttcaatgtcaacaaaaaggaatacagggatctgttttaagtggctggaagccacttctaattataccttcctttttaaaaatggagagtttaaaaacaaaacagaaaaaaaggcacagagacacagattagttcatctctcagcaccaaaaactcttctttatgtaacagatagtgataacacaagagacccgccgggcgtggtggcgtatgcctttaatcccagcacttgggaggcagaggcaggcggatttctgagttcgaggccagcctggacagccagggctacacagagaaaccctgtctcaaaaaaaaaaaaaaaaaaaaaaacacagagacctacaactgattggagaatgaagaagataagaagccatgaaatactcagccctagccaagagtggtggcacacacctttaatctcagcacaaatctcaggcaaagaaagggggatctctgtgagtttgaggccacctagtctacaaagcaagttctaggacagccagggcagttacacagagaaaccctgtcttggaaaacagaagaaaaaaaatgctcagccctccatggaacacctctaacgtattggagaaggattaggaggtatggccttgttggaggcagtgttccactgggggcatagactttgaggtcccaaaagcccatgccaggctcaggaactctcttcctgctgctgtatgcctctcagctactatttcagcaccatgtctaccgttgtgtagccatgctccctgccatgaagataatggattagacctaaagaaactataagcaagccctaactaaatcctttcttttattggagtttctgtggtcatggtggcccttcacagcaatacaacagtgactaagaaggcaaaaagactaagagtcagaaggcaactgcaggcaaaccgttacctgaacacataagggtagttgcatatttgcacacactgctgtgtgacctctcatggcagtcgtgacagcaggctcaagacccatgtgcatgctcaaaccagcataaagagatgaggtgggcactaagtcccactcctccagagattgctattggcaattaatagtggctaggagaggaatctgttttctttaagggtatatgggctctgggagcggggccggtcaaccacgctccagtagaaagccacacatccaggagtataagggcagcaaaagttaaacgtggtagtctttaaaaggggggagggggggcacaaagttgagtaggtgaggaaaggagggtggatctggaatgagttagagaccatatgtggtcaaaatgcactgaacacaatttttaactaataaaaattgccaaaaaggaaaactgaaaaaaaaaagttaataaaaacagaaaaaataaatggtgagtctctgaagtatttataaatgtaaaagtatccatccaagttaataaaaataaatataatatattgaatccctactctgtgatagacagtgctcaatgctttacccacattttgctaccaatgactacaataaagactgtcattcctgcaaagaaaactgtcatcacttgtgacaacattcctgtccaaggtaacttaaggaagtatttcctgtggatttaaaagtattagtctattatgacaggaatgacatatggtaagtaacatgaagcagctagccacatgatgtccttggtaaagcagagagaaatgaatgctggtcttctcagtttttttcttctcagactttgacctgggacctaggcatggtgccatctacactcagactgggcctttcctcttcacttaaaccttggaacccccaccaccaccaaacatacgcggaggtgtgcttcaatgctgattttaaatgcagtcaggtttaataaaaagcacactaatgccgggcatggtggcgcatgcctttaatcccagcacttgggaggcagaggcaggtggatttctgagttcgaggccagcctggtctacaaagtgagttccaggacagccaactaagcacacctgtgttgtaatcctggcctccaaagactcatttcattttgtaaagaaaggtctgtcacagagtggggattcatgtattccatctctaaatgttcccataacatttagcagtcttgatgctactcacggtgggcacacagtggctcacacctttaatctcaggcagaggcaggtggatctctgtgagtttaaggtcatcttgatttatatagtgagttccaggcccaccaaatctacagagtaagaccctgagtccaaaaagtgaaaaaataaaaaagccaaaagctcttctgagactcaaaacacacttaactgggaacctcatgaagtgaaaaaacaaaacaaggtagagactttcagtatgcaatggcaaagaataaacattcttttgaggcagagtttctctgtggaacagccttgctgtcctggaacttgcctagatcacgctggtcttgaactcatagacacacacctgcctctgtctcccaagtgctgggagcaaaggtatgagcaaccctgcccagcttagaataagcattcttaaattgaaatctgagaaagtaacgtatatatctgaaacaaaaagtctcaggatacctttagaattattttgtgtatgtacatgtatgttcattcacatctgtctagacacatgtgcaggtatatgtgtacatgtatatgtatgtatgtatgtatgtatgtatatatgcatacctacaaacacaccccaagttgacatttggtgtattgcttgactgctctttatatattgagcagggtcccttgagtaaaatgactttgaatgttttagaaagagatgtatttagttttactctataagagtgttttgcctgtatgtatgtgcatacattatatgcaatcctggtacctgaggagactagaaaagggtatgagatccccagaaactggaattgtggtgatttgtgagccaccttgtggttgctgggaactgagctctgcaagagcaaaatgctcttacctctggctctggctgacctggaactctctctgtggacgaggattaaaggtgtgctgggtttaaagacatgcaccaccgccgtctttcttcatcattcccgtttgaatgtggtgctggggagtgagtccagggcttgggcatactaggctagcgttgtacggaccgaggcccagtgccatcatttagattcaatatgattgttaatatagttgcattaaaccctctaatttgaccagttttctctctgtctcgttacaccactcctctgtcttagttagggtttctattgctgtgagaaaacacccagaggaacttggggagaatgtgatttacatcagctgaagcttccacgttccagcccatcactgagggaagtcagggcaggcactgaagcagacgccatggaagaacaatgctaactgacctgctcctcagagcctgcgcaccttgctctcttacacaactcaaaaccatctgcccaagggtggcactgcccacgcagagctggcccttcccacatcaatcctcaatcaagaaaaagccccacaggcttgcaggtggccaatggggtggggggagtttaattgagagtccttcttcagtgactccagcttgtgtcaagttggaaacaaaactactcaatgaggtaacccttttggatattttttgtatataaaaatataagaaaaaataaaaagtattagtgtgaataaggtctggttattagaaaaagacatgttgtatcaatggtaatctcaggattttgatttgcattgtggctaaaagattacaaatgtttaagggtgtgcactcacacatttgggaataaaatggcatcacacttgcaatgtgtttttgaaagattaaaaatataaataagggccagtgagatgtctcatgtaaaggtgcttcaagctagacagtctgaattcaatgccaagaacccatggtaaaaggagaaaaccaacttccaaaagtgtcctctcaccttcatacatgaataattttatgttcatgcacccccccacacacaaaactccttatatataaaataacaataaaaaatttttaatgtttgttttattttattgtattttattttggtttttcaacacagggtttctctgtctaacagcactggctgtcctggaacaccctctgtagatcaggctgatcttgaactctcagagatctgcctcctgaatgctgggcttaaaggcgaacaccaccaccgcccaccttcaaaaactaaattttgagggcggcacctaatattcttttttttttttttgaggggataaggcttaattttatttacatattctaaatttgcaggcctaatattcttgtaccccttttctgtaactaggggaaacacgccatcaatcagtgtagaagactttcctgcagtatcaggctggttattcactcttcgtgttggactgtgcatcctgggagattttttttttaatcttatgacaggtgagagaagtgggagaaaagaaactaaaaattacagacctgaggtgatctctcaggaatgttatcttctatcctgagacttggaaaaaaagcttggctccaagtcctaccttaagaggcaacataccataatataacatgacatgatatgatatatcagagtataatgtgatataacataacaacataacataagataacataacataagacagtacagagcctggcaacacctatgaaaaccactgggtttcttcccaatacctcaaacttgcttggttcccaagtgcttcctgaagacagcagtgctttgaccggcttgaacataaactgagcaaaatccactgagtacagctgtgaactgaagttcctctcaaccagaaagtcccaccttcaaagacgaagcatttcagaaggttgattgttaaactattgaatgattgggatgggttggaatgtttcaattccaaagccaaattatctcgggctatcttatccttctagataaccacccaaggtctacattgtttgacctgacatccttgtgactagtaggttaaatccctctggaatgtacaaaccgaccccttccttccaccaacccagaagttaaaacttgtcatccgtcagataacatctggagcctacagaggcttcctcactttgccacttcacgtttctaccaatgtattcaaaaagcacattgatttataatgttaatctattactataaaaatcttcatgaaggccaggcatggtagtacagtgccttttgtctcggcagaggcagaggcaacacctttctgtgttcagggccagcttggtctacatagaaagttccaggctagccagctgttactactatggaacatgatatttggggaaacctatatctatgttctctgcccatggccactcatattagactttagacagcccttgtaggagatgggtgagaactgctttattcttactataaaattgacttatattatgcatcttttcctgagtttgtattcacacagacagacagacaaacagaccagaaaaagtgttttttctaagcccatctttggtaaactaagatgtttattgggggttatacccaccagggcctgggggactcagccagctggagcactgaaaagccacactccaacattggagatgtctctctaacactgtctctcgttatcctgggcagtttgcagacagctctactccaaaaggctttcctttgtcaggcatggtggtcacaaactgatcccaatgtgtagatgaggtgcatctcattcttaaatcccagtgatcaggaggaagaggccggctcagtgaacttccagaccgcctgagctacagagttacacagagttataacttgtctcaaatggaacagttttcaccatcttgaaacatgcagagactgtcagctgagtgctcaggcacaaatgcaacatctgtggtgggtaggaaaagatggtttgtgagctccgacccctaactaaggagctacggacaacttgtgggttctgaataaaagagattcagttttctttaaaggtacagctctgtcttagccagggtttctattcctgcacaaacatcatgaccaagaagcaagttggggaggaaagggtttattcagcttacacttccatactgctgttcatcaccaaaggaagtcaggactggaactcaagcaggtcagaaagcaggagctgatgcagaggccatggagggatgttccttactggcttgcttcccctggctcagcctgctctcttatagaaccaagactaccagcccagagatggtcccacccacaaggggcctttcccccttgatcactaattgagaaaatgcctgacagttgtatctcatggaggtatttcctcaactgaagctcctttctctgtgataactccagctgtgtcaagttgacacaaaactagccagtacaagctcctaataaatccactgcatcacagcgggtcacctcacacccaggaggggatgggcagcacagattggtcatacacaatactaaacaaaaagcacgtgaagttgagggtgtcaggaagtggaaatggataggaggactgaggaatcaagattattaggacacattatatgaaattctcaaaggattttttgtttgtttgtttttcgagacagggtttctctgtatagccctggctgtcctggaactcactttgtagaccaggctggccttgaactcagaaatccgtctgcctctgcctcccgagtgccgggattaaaggcgtgtgccaccacgcccgactcaagggattttttaaaaaacgcttcaaagagcctcttctccttgcaattgattagcacttccatatcctggaggagggtccacattagtttcctccttataggaatttgtttggtttctctctttcttcttctccttcccttctctctctgggcatgtgccctttctctttttctcttccccctcacccactccctggtgacttgcctggccttggtccttgggaccagtgaaatggcctgagagcagcttcccagcaaacctgcctatatataatcaaagtcgtcttaaattggcttgtttcaccagcagagaaataacttatcagaatttagtgggtatgagcgtgcatgcaggcgtgcgtgcgtgcgtgcgtcgcaagcgaacaatggcgcatgtttggggaggacatacagaagacaatctgtagaagttgactctctccttccaacacatggggccagggggggttagaccaggcatatcagcaagcacctttacctattgagccttgtcgtcagaacttgtagaaaatttactaagctcagtctagttaggtcatcatttagttggtcacaaccactctcatgaaagacagtctgtcacatggcacattgcgttcccctgtgagcgctgaagagcatcaggggttcctgctgcgttaatggcggttgtttaatcagtactttaacgccatgctttgtttcttttgctacggcagcaagcaattaaatcccctttatttcctccatccttagctgcaaggatcgaaccgcgttgtcccgttatttaggcagagaatgcagagtctagtgtttccctctgcggctctgctttccagaaccccgcaccggtatttttacctgctgaagtatcccagatcgctgctttctggtgctgaaagtgggggtgtagatagactttaaatagctccatttatttgataataataataatttacaatttgagagggaggttggtcattcctggtgactaattttacagtgtcatctaatgttcgagttccctgtcacatttttgttattacgtccaaatgcctacttaacgataacagtgcaaatatgtatgttaaacacccactctagaattttaaatcttagctctttctgaatatgttttggtgaatttcaatgtgggaggtgatataatttaaaactttatattttctactccagtgaaaggcataatttctctgacatattttttttcccatctagaataaggaattacactagaatagtgttttaaaataagatttgtcgacataatgacatttttttccctactcttcacttctacccaaactaaaatagttcaggaacatttatttacttatcgtaactgctaggaaattatagtcattacatccaccatcactttccttataaaccacaccatttcatcgctgtagaaaacctcttgtgtttctgtcctggtactttacccatcagcaaagcttttggagctgagcaaagtacaaaagccatgctatgcagcctttgcctcccagggtctctctttcagaaaagactttctgcttcgttgcagagtggagggttgcctgcacactctgctagagatctacaatattcaatgtgaacttgcagaaagggcaaaacaaataagtagaagcctttagcccatggcattataacaaattagagctggagagatagctcagtggttaaaagcatggctgctcttccaaaggacctgggttcaattcccagcacccacatgacagctcacaattgtttgtaacattggttccgggggatctgactccttcacccagacatttatgctggaaaaatgccaatgcacataaaaaaataaaatgaaaaaatcaacaagttatgttatatctaaccatgggcatattaacatagaggcaattattctacattgttttacatagtcaaggtctaaaacataacaattcattagtcattacacattcaaaatagtcaaacttaaataggaaaaaatactatttaaagtatttaacatttggatctgaggacgtggtttagtggctaagggcacttgctgttcttgcaaaggacagttcagttcccagtacccacaggcaactcagtcaattgtacctccagctccaagggatcgggggtcctcttctggcctccactggcacctgcacatgtgttcatgaacatgcaagacacatacagacacataaataaaaataagactttaaagtatatatttcacattgaattctcttactactagacatctaaagtggtgtggcatcctatttactaaaacaataataataaaaataaaaatactcaatagtcctctggctctatcagacaacagtttgctcaggactttggttgtaggtaaaactatccacatatgtaagaaatcaaacaacccaggttttcagtttctgagcccttcatatttccagcagactctgatactgcgtgtggcatttacaaggaggcagacttagctcagcttgttgacctcatggatggcatagcagtcttacccaatagaatgattactcaacagaactctttgaaggttggttggttggttggttgtgaaatctgccaatgttgaaatgttggcattccactgaaaagtgcttaggacattgtggcgcttgtgtgtcaggggacttgcctacccaggctcctctgttgccctctgttggatgattgtttccttcaagttgggcaaggttattactgtcttaaatcagagtagctgtgataagccatacgagacccctacagctccccagagctgtaggacctatgaatattcctgtagagaaggaaaagacaagaggctctttgggacttgctggctagccaatctatctgaatttggagctccaagttcaagagtcttcttaaaatataaggtacacacacacacacacacacacacacagagagagagagagagagagagagagagagagagagagagagagagatgaacgcacaattacagctggtccaatgatggctctacaagtaaaagtgcttgctgtcaagtctgcactgagtttgatccctgtggtagtttgaacaggaatgtgtttaaatgcttggaccatagggagtggcactattagaacctatggcctcattggaagaagtgtgtcactgtggaggtggaatttgagctcaagctatgcccagtgtgacatacagtcactttctatggtctgtagatgatgatgtagaactctctgctcctctagcaccacatctgctgcaccctgcctgtttcccaccatgatgataatggactaaacctctgaaactgtaacccagccccagttttctttataaaagccactgtggccatagtgtctcttcacagcaataaaactaactaagacagtccgccaaatccacatggtagatggaaataactgaccacccctaatttatccacatagtgatactcatatgtacacacacactattttcaggctgatgtctgaaaaacaatggggaaagaggaatatgcaacccctagaaattagtgtgaatatctctggaggagagggagaatcaaagaagcccctgaggccgctcttagctcttggggaactgggaagattagaaggacaaggttgtccagacacagctagaaagggagggtgtgaggctggtggaataagtggaagtgattgtggagagacccgggttttttggtttttggtttttggtttttggtttttggtttttggtttttnnnnnnnnnnnnnnnnnnnnnnnnnnnnnnnnnnnnnnnnnnnnnnntagagcggcttgggcttggaggtatgaaagacgacagtagaaatacaaggaagtggtggcttttgagaaacgcgattggtctttatggaagatagacgtgaaggaagttccaggtgttgtcattacctggcccgtggcccattcaccaagatgcagcagcactccagggaggaaaaagagggtgagtaggcatttccatgacagatggatgattggtgagtccaatatgaaacaggcagaagactaggggatctgattctcagatgaggagatcagctggatgctccgctaatacgaaaaccatgggagggctaggcatacctcatgtgagtgaggaggagagggcttgagtagagcctctgtgttccctgcctcactcccctctcccagctcctctgcagagtcatggacagtccagtggacactcacagtagattttcagactgttgcattctatttttatgagtgcaggatggaacccagacattccatatcctccttattttcctacagtacatctataatgcccaactggtactcaagagcccctaaacttgatggtagtgatacattagtatactacatctactagttaggcttgatctattgctctcttatgatacagtaaggttgtacctgattgatattatggtggtttgaataagaacaaccctaactccctgccgccgccaccaccatgggctcaaatatttgcatgtttgatctccaattgatgaacttttggggaagggttaggaggtgtggtcttgctggaggaagtgtgtcaatagcagtgggcattgaggtttcaaaagatcatgccagacccagtttctctctctctctctctctctctctctctctctctctctctctctcacacactcaggatgtagctttcagctgcttcttcagcaccttgcctgtcatatgtgccaccctgttccccattatactgataatgtagtgatctctcctctaaaactgtaagcaagcctccattaaatatttatttttataagaattgccatggtcttgatgcctcatcatgagtaaaaactctgaaggtgaaaatgtctcatcatatcccagggtaggatatagtgaatgatcacttaacctatatgtatatgtttactttaaaatttattgcaaacaaatattttaatattctctaccatcaattttttctgcctccttataactagctggctgattgacttgaccagtaaccagaatgattgtcttacccttctgtatatataatgaactaatgatattcatttttaggatcccacattatagccaggctgtgactgccatgtggctcaggagggtggaaaaccggaagagattcactaaagagtccaccctgaccaccgctggcagagaaacatgaactctggactctgacattgcaagattcacatttccttggtccagctttttatcctccttccctcttgcacgttgaataactaaccaagacagtgttggtctcaagaacctgtagggatgagagtaaatgagtatatttactgtttagtctcgcattgattggctagactagctgaccagggtactctggaatctgatgactgcctgcccccagtgctggggatataagtgcttgccaatgcacctagctatgctgtaggtgttgggagtcctaatccaggtccttatgcttgtgcaagcaagcatgctgcctgcttcgtcacattctcagccagccgctttttttttttttttccattttttattaggtatttaactcatttacatttccaatgctataccaaaaagtcccccatatccacccacccccactcccctgcccacccactccccctttttggccctggtattcccctgtactggggcatataaagtttgcaagtccaatgggcctctctttccagtgatggccgactaggccatcttttgatatatatgcagctagagtcaagagctccggggtactggttagctcataatgttgttccacctatagggttgcagatccctttagctccttggctactttctctagctcctccattgggagccctatgatccatccattagctgactgtgagcatccacttctgtgtttgctgggccccggcatagtctcacaagagacagctacatctgcgtcctttcaataaaatcttgctagtgtatgcaatggtgtcagcgtttggatgctgattatggggtggatccctggctatggcagtctctacatggtccatcctttcatctcagctccaaactccgtctctgtaactccttccatgggtgttttgttcccaaatctaaggaggggcatagtgtccacacttcagtcttcattctcccttgagtttcatgtgtttagcaaattatatcttatatcttgggtatcctaggtttggggctaatatccacttatcagtgaatacatattgtgtgagtttctttgtgaatgtgttacctcactcaggatgatgccctccaggtccatccatttggctaggaatttcataaattcattctttttaatagctgagtannnnnnnnnnnnnnnnnnnnctgagtagtactccattgtgtagatgtaccacattttctgtatccattcctctgttgaggggcatctaggttctttccagcttctggctattataaataaggctgctatgaacatagtggagcatgtgtccttcttacctgttggggcatcttctggatatatgcccaggagaggtattgctggatcctccggtagtactatgtccagttttctgaggaaccgccagactgatttccagagtggttgtacaagcctgcactcccaccaacaatggaggagtgttcctctttctccacatcctcgccagcatctgctgtcacctgaatttttgatcttagccattctgactggtgtgaggtggaatctcagggttgttttgatttgcatttccctgatgattaaggatgttgaacattttttcaagtgcttctctgccattcggtattcctcaggtgagaattctttgttcagttctgagccccattttttaatggggttatttgattttctgaagtccaccttcttgagttctttatatatgttggatattagtcccctatctgatttaggataggtaaagatcctttcccaatctgttggtggtctttttgtcttattgacggtgtcttttgccttgcagaaactttggagtttcattaggtcccatttgtcgattctcgatcttacagcacaagccattgctgttctgttcaggaatttttcccctgtgcccatatcttcaaggcttttccccactttctcctctataagtttcagtgtctctggttttatgtgaagttccttgatccacttagatttgaccttagtacaaggagataagtatggatcgattcgcattcttctacacgataacaaccagttgtgccagcaccaattgttgaaaatgctgtctttcttccactggatggttttagctcccttgtcgaagatcaagtgaccataggtgtgtgggttcatttctggatcttcaattctattccattggtctacttgtctgtctctataccagtaccatgcagtttttatcacaattgctctgtagtaaagctttaggtctggcatggtgattccgccagaagttcttttatccttgagaagactttttgctatcctaggttttttgttattccagacaaatttgcaaattgctccttccaattcgttgaagaattgagttggaattttgatggggattgcattgaatctgtagattgcttttggcaagatagccatttttacaatgttgatcctgccaatccatgagcatgggagatctttccatcttctgagatcttctttaatttctttcttcagagatttgaagtttttatcatacagatctttcacctccttagttagagtcacgccaagatattttatattatttgtgactattgagaagggtgttgtttccctaatttctttctcagcctgtttattctttgtatagagaaaggccattgacttgtttgagtttattttatatccagctacttcaccgaagctgtttatcaggtttaggagttctctggtagaatttttagggtcacttatatatactatcatatcatctgcaaaaagtgatattttgacttcctcttttccaatttgtatccccttgatctccttttgttgtcgaattgctctggctaatacttcaagtactatgttgaaaaggtagggagaaagtgggcagccttgtctagtccctgattttagtgggattgcttccagcttctctccatttactttgatgttggctactggtttgctgtagattgcttttatcatgtttaggtatgggccttgaattcctgacctttccaaaacttttatcatgaatgggtgttggatcttgtcaaatgctttttctgcatctaacgagatgatcatgtggtttttgtctttgagtttgtttatataatggattacattgatggattttcgtatattaaaccatccctgcatccctggaataaaacctacttggtcaggatggatgattgctttaatgtgttcttggattcggttagcgagaattttattgaggatttttgcatcgatattcataagagaaattggtctgaagttctctatctttgttggatctttctgtggtttaggtatcagagtaatagtggcttcataaaatgagttgggtagagtaccttctacttctattttgtgaaatagtttgtgcagaattggaattagatcttctttgaaggtctgatagaactctgcactaaacccatctggtcctgggctttttttggttgggagactattaataactgcttctattttttttggtgatatgggactgtttagatggtcaacttgatcctgattcaactttggtacctggtatctgtccagaaatttgtccatttcgtccaggttttccagttttgttgagtatagccttttgtagaaggatctgatggtgttttggatttcttcaggatctgttgttatgtctcccttttcatttctgattttgttaattaggattttgtccctgtgccctttagtgagtctagctaagggtttatctatcttgttgattttctcaaagaaccaactcctcgtttggttaattctttgaatagttcttcttgtttccacttggttgatttcacccctgagtttgattatttcctgccgtctactcctcttgggtgaatttgcttcctttttttctagggcttttagatgtgttgtcaagctgctagtatgtgctgtctcccgtttcttcttggaggcactcagcgctatgagtttccctcttagaaatgctttcattgtgtcccataggtttgggtacgttgtggcttcattttcattaaactctaaaaagtctttaatttctttctttattccttccttgaccaaggtatcattgagaagagtgttattcagtttccacgtgaatgttggctttccattatttatgttgttattgaagatcagtcttaggccatggtggtctgataggatacatgggacaatttcaatatttttgtatctattgaggcctgttttgtgaccaattatatggtcaattttggagaaggtcccgtgaggtgctgagaagaaggtatatccttttgttttaggataaaatgttctgtagatatctgtcaggtccatttgtttcataacttctgttagtttcactgtgcccctgtttagtttctgtttccacgatctgtcctttgaagaaagtggtgtgttgaagtctcccactattattgtgtgaggtgcaatgtatgctttgagctttactaaagtgtctctaatgaatgtggctgcccttgcatttggtgcgtagatattcagaattgagagttcctcttggaggattttacctttgatgagtatgaagtgtccctccttgtcttttttgataactttgggttggaagtcgattttatccgatattaaaatggctactccagcttgtttcttcagtccatttgcttggaaaattgttttccagcctttcactctgaggtagtgtctgtctttttccctgagatgggtttcctgtaagcagcagaatgttgggtcctgtttgtgtagccagtctgttagtctatgtctttttattggggaattgagtccattgatattaagagatattaaggaaaagtaattgttgctcccttttatttttgttgttagagttggcattctgttcttgtggctgtcttctttttggtttgttgaatgattactttccttggttgttctagggcgtgatttctgtccttgtattgcttcttttctgttattatcctttgaagggctggattcgtggaaagatattgtgtgaacttggttttgtcgtggaatactttggtttctccatctatggtaattgagagtttggccgggtatagtagcctgggctggcatttgtgttctcttagtgtctgtataacatctgtccaggctcttctggctttcatagtctctggtgaagagtctggtgtaattctgataggccttcctttatatgttacttgacctttctcccttactgcttttaatattctatctttatttagtgcatttgttgttctgattattatgtgtcgggaggaatttcttttctggtccagtctatttggagttctgtatgcttcttgtatgatcatgggcatctctttttttatgtttgggaagttttcttctattattttgttgaagatattagctggccctttaagttgaaaatcttcattctcatcaattcctattatccgtaggtttggtcttctcattgtgtcctggattacctggatgttttgagttaggatccttttgcattttgtattttctttgactgttgtgtcgatgttctctatggaatcttctgcacctgagattctctcttccatttcttgtattctgttgctgatgctcgcatctatggttccagatctctttcctagggtttctatctccagcgttgcctcgctttgggttttctttattgtgtctacttccccttttagttctagtatggttttgttcatttccatcacctgtttggctgtgttttcctgcttttctttaagagcctgtaactctttagcagtgctctcctgtaaatctttaagtgacttatgaaagtccttcttgatgtcctctatcatcatcatgagaaatgtttttaaatctgggtctagattttcggttgtgttggggtgcccaggactaggtggggtgggagtgctgcgttctgatgatggtgagtggtcttgatttctgttagtaggattcttacgtttgcctttcgccatctggtaatctctgaagctagctgttttagttgtcactgttaagagcttgttcttcaggtgactctgttagcctctatgagcagacctggagggtagcactctccttagtttcagtgggcagagtattctctgcaggcaagctctcttcttgcaaggcaggtacccagatatctggtgttcgaaccagactcctggcagaagttgtgttccactcactagaggtcttaggatcacgtgtggaatcctgtgtgggcccttgcgggtgtcaggcgactcagctggcaaggtagccggggcttgagtggagtggaaggggtttgtgccccagatcaagcccgggtagcctgcttccctatgtaccgcagtctcaagttccacgcgattggattggggtaggcgctgtgttccactcaccagaggtcttagggtcccgtggggagtcccgtgtgggcccttgcgggtgttgggcaagactctgctggcaaggtagcccggggctcgagtctcgagtcgagcggaagggacttgtgccccagatcaggcccgggtagcctgcttccctatgtaccgcagtctcgagttccgcgcgattggattggggcaggcactgtgatccactcaccagaggtcttagggtcccgtggggagtcccatgtggacccttgcgggtgttgggcaagactctgctggcaaggtagcccggggctcgagtctcgagtcgagcggaagggacttgtcagccagccgcttttaatgagagacgcagatctgaaaagtgacactccgacagctagcagatggaagaaagatgaaggaaaacaagttatggaatgtttttatttggaaccataagagaagcatttaaaataaaccttcaaagtcttttctattagcatgatttgagtaaccaatttataagaattggattatttatatacacttgactgtaaaaaacaaaatacctctttgtaatgttcacaccatcaagctcaatcaagccaaacaagatagttaactaaaatgattaatggatgcagatttagctgagagctttaaatcaagaatgtcttgctgatgtcagggttgattagctctccatctgatgctggcgctgttaaaagccttaagcaattcagataaactcattgagcaaaattccaaaggggtgagagaaattccatgagggtgcattttttctggtagagtggcgggtgcacaagtttgcaggaagggggctttcctgatggggtggaagaatgagagtcagaggggctgagcaggtggcatcgatcacggcaaagctgaagatgtttggaattaaagaaaaaaatcatctttgcacaaggattccaaatggtgtgaggctatgaatattgatcatttagcttcagagtgttcaggaatccgggggggggggtgtgtgtcggggaacaaatgaaggagaggcaagaagttattacagagacatgccctagtaactcttctaaaagtgaatccacaaggaaatcactgtagccggttgttgaagccacacttccattattaagagaacagaggtgaagatgactcgggtcctgagaccctgggtccgatgattgggaaccacagttcttgggactggaaagtgaactggagtgttaagccaatggaattgaaagtgagaatctaattgactaaagagacaccccacctgtattagaaggttaccccagcctgttgcagtagattcaggaactaacggtctcggtagctgtgacttgtggaagttaagtgacggagggactgttaaaacatctccaatatctgtctgtgccttcgaaacctttcattttccatatttcctgaattttcccaactcctgctttgtccagcgtctgaggtgggagtgctgcccgtggatcagtagacactggaaggcatctggtgtcctgaatgctgttttgacaactccaggaaaaaggcagcgaataatttcgacccctgtatgtagttccacctaacaaaaagtaagaacaaggaaacacatttccattcacatgaagaaggaaaagcacacaaccatgtccacagaaaaactgtacctgctataaatcctatcaatctaaagtacttagcatgcttctgagagtcctagaatcaaagtcatgcacagaagaaaaatggcatcatcatcatcatcatcattattattattattattattattattattgttatattattatcattattaagacgatgatatccagatgtggtatccaatgacaaatcccagcatttgggaaacagaggtaaaaggatcattgcaagctcaaagccagcctggtctgcatagatatttccaggtcaggtatagggtgagattctgtctcagaaaatagagaggaaggaaaagaaaaaggaagaggagggggaagaggaagaggaagaagaaggaagagagaaacaagaaggagaaggaagagaggccaattaatcctggactcagccccccaaatctccatcacatttgttacccccctgcctttgcctctttgggtgacaggattcctgcctttcctttctcacctttgacatggcagggattgaagactcaaacatttctgtttattcctccttaggagttttatataatccaaatccatacattgaagccctcactcaccatgggacaacattggacagagggtcttccaatgagaagataattacaaataagcgatctttggggatgtctcataatcccatgggcttgatgaacttataggggaagaagaactggaggccctcacttgcctcttgcaggaccatcccttcctcttcttcttcctcctcctcctcctccattcctctctctccacctcagctcgagtcctgccacacaggacacacaaggacggcagtggtctgaaaataggcttaacctggtgttcccaacctaaggaactgtggggagctaagcctccggctttaagacaccaggtctgttattgtccagtctcacacaaggttagcgaacaggcccacgtggagctccccccgccctcacagggtccgctcacctgttgatcttctcattctgagagtgctctccatcgtccacagctcccagtgggagcatcatcacactcttttgtgtgatagcctggaatattttggcaattggaatggttgacccatcccggatcatgtcaggattaactccaaacactaaaacacaggcaaaaaagggcactagaataaatcatgacaagactacgagtatagtactgtgtgcttttctttatttctttgaggtcttgttaagtagcccaagctggcatgcaattcactatatagcccagacttctgtcaaactcaaagtcccctgcttcccaggtgctggacttgtatgtggtcacacttggcttaaaattttaattttgaagcaaggtaaaaaatttttagaaattgcaaacgtagcccacacagcatttctgtatagcaccaactctgctttctttatataaacatcttatgtaactattgtacaacaaccaagagtcagaaagtaacagtagaatattttatatttttctttttccttttccttttccttttgtgtttctttgtttgattgattttttgtttttgtttgtttgtttgtttgttttggggtttttttcttttttttctcttgttttggataggcaccaaaattacatttattttaaaatcactttatatcctgatctctgtccctcccccaaccctcttccctcctcctctaagagaacggagacatcccccccacccccnnnnnnnnnnnnnnnnnnnnnnnnnngtatcctccacccttgcacatcaagtctctgtagggcttggtgcttcttcccccactgaggccagacaagacaacagagttggtgaaatggaccccatagacaggcaatagctttagggacagcccctcccaccccccagttgtacaggacccacccgaaagctgagcagcatatctgctacatatgtgagggcagagggggtagggtggctaggtccaacccatctgtggtctttgattagtggttcagtctctgaaggccctcaagggtccaggttagttgactctgttgatcttcctgtggagttcctatctcctttggggccctcatttcttcccccaactcttctataagagttcacaagctccatcctatgtttggctgtggatctctgcatctgtctaagtcaactgctcggtgaagcctcttagaggacagccatggtctcatggacggctcatgagtccaagcataacagagtatcattaatagtgtcagggatttgtacttgcccatgggatgggtctctggttaggccggtcattgcttgcattccttgtaggcaggacaaattttgaacccaaaattttgtgggtgggttgatgtccctattacttcactgggtttcctgcttggctataggaggtagcttcttcaggttccatattcccactgctgtgaatctcagctaaggtcacccctataggttctttggagcctctcctatcctaggtctctggaatatcctcaagacactccccacccccgggcatctacagatttccattcattttatggccatctacctgagatggggtttctttatgtagccttggatgtcctggaatgagctctatagaccacctggttaatccttgaactcacagagatctgactgcctctgcctcaagaatgctgggattaaaggcatgcactagcactccctggcttaacagtggtactatttatctactaatgttgtaagacttttcctggtcaggggtgaacaaacatttgctcattctaacccaaggcaccaacacaccaggaggtggggtggggtaatcctacccaagtctaatttggtgccccagtgacttcaattggtgttaggtgcaagagcatggacaacaaatgtccccttacaccaggaattgttaaccattgcatctatttgtggagaagtgtggcctcttacctccactgtgaaggtttccttgtgacctgccttgtgccacctttccttctttcacaaagaaacattagtctccctaatactgcaaggatcttctgctaataattatagttgactttaagggaggaactattgtgtcgggcatggaggacaaagtttcccaacaaataactgtactccagagttagctaacatttcattcatctttcttcctccctattcctggatctgacagaaccccaccagccttgtgttgttacaagttccctcagtgttctctcatctttcatgcccttgtcccttttacagggtatcaatcagctgctttacaagatgtacctcagtttgatgaagtatcctgctttcccataactggaagatgttatgcacgttttgacaagattcaaaatgatatgcttacatcttattgttctagtttcatttctgtggtgataatattcctgacaaagacatcttagggcagacaggattatatcatctcacaattccagactacagaccatcactgcgggggaagtcaaggcaggaatttcaaacagatggttgtgtcccatccatggtcaagaggtgggataagtgtatgcacgcatgcttgcttgcttgttcagggccgctgcatatggagtggtgctacccaaggtggattgagtcttctcatatcaatgagcttcatcaacacaatcccccatactcattcccaaagagcaacccaacctaggcaattctgtattgagacttcttgtccaggtgattctcggttgcatgaagttgacatgattaaagttaattgtcagaatcatgaattaaatattatggaagtggagttttgttgtcatcatcctatggtgatatatataaatttagctgtctttacctatcaacttagtgtcattatctttttttctagttttcaaggtacctcatgaagtactttcagctgctgcccttggcactagatagagattaactcaacctctagctctgagaaaaagttgccagtggagaagcagaaatggcaaataaagaaatgaaacaaagcaggccacctcctcttttaaaaattagatctatttacttattttattttatgtgcatgtgtgtcgtatctgttcctctgtgtgcatacgacaaacatgtcttgtccctacaaagttcagaagaaggtgttggatcctctggacctggagttactgatggctgtgaaccatcttgtgggtgtggggaattgaacctgggtagctgcaagagcaaaaagtgttataaaccactgagccatctcagcagccccatgtcccctctccttactcacaaaggcaagtgagaatgtggatagaagccttgttgttagagcagatttgctctcagcggctaacacagtgctctttagcaaatgtctctataaaccttcatttcccctgctacctaaagactgttgtgaggaccacaggaagtaccagctaagaagccctctgtgcacacaatactgtgccctgtgtggtggttaattttggccacttgccagaggccaaagagtgtcctatgcattccagccaaagtgtttcataactctacatggtatcttcctgtgctgtttcaaatgtgtcatttctcactggcattccaatttgccttcctgactcttccgctttgacatatcactagtgaaatatctgttaacaataggatcggcaggaatgacactataggagagcatggctctaaatcttggattcattctgtgttttttcaggtctgtgtccctcaatcccagcagagagtttatgcttcaaaaaggtctgggcaaggctggagggatggctcggtgggtaaaatacttactgccctttccagaagatcttggtttataataatcacaagatctcacagctatccataacagcagctccaggggatccaatttcctcttttgacctccagttgttgcacatatgcagatacaggcaaaacactcataacacataaaacaaaataactctaaagattaatagaaaaggtctgggcttctctattttgctcagtccacaatgttggaggtctcagttcatcttccatatatgcaggaatctgtctagtaaggtattattgccatggaaacagagacaggctattccaactgaatggacttgttagtgtggcagagaacaagcttccttcttctatatccttagtatagatttccagtagaaggtctagcccaggataaaggtggatcttcccacctcagatatgcccagacatttgggttttaattaatttcagataaaatcaacaaccaagaatcgccatcaagcccttttgtgggaatgccatatttatggtcacatgaactaagcagtccagctacagactccgaatgtgatgaactgtaaccagagcagaaattagggtatcaaacctaagtaagggtgtgtccatgactgtaagttattagagaaagttgtattcattcaaagcacaacaaagatggtggatatctcactttctcactgtctatatctctgtctgtctgcctctgtttatctgtctctgtttccctgtctctctctgagtctctctctctctctctctctctctctctctctctctctctctctctcacacacacacacacacacacacacacacacactacatcaagcagtgctctcaggagacaaccaccttcacatggttgggtctcattttgatccctgcttcatactgcccagaggccattacagcgtgtttccttctatgaccaagatgagatgctcagagggacaatcctcccactagactacagcttctccatttataatccctaagtgtctcccatgatattttttatgtgtcggccaacatgtctgtaagttttccttcgggagagtattaagttttcctaatctatcattttgcctaaatctttgaatatgaaccctggcttcactgtttagtagctaagtgctcgtgattgttaattgtcattgttagcttgcttgattggatttagaatcacctggaagctctgtgcccatctggcagtgtctccaaagagaactaatttgtagggagaagagctaccctgaatgtggaagatagcagtccatgggttggggcaatgaactggacaaaatggaggaccaaatggaataacccctgtgaagtccagtagttctccaggaatcttccaggccttctgcatcacgttagcacccagcctcaccgagcaagcagctgtctcacaatgtaatgcagccattattgcaatacccagactgtcccaggaaaagcagtcagatcaactccctttaaacacatactcgttctattgcttctgtcctgctagaaaactgtaacgaatgcaccacagatagaagacagctgatatatgagttataaaagtgtcttgtccccactgcaaatgggtgaatcaaagcataagtcccacctgttttgatggttctctgtgctgcaaggtactgagtatcattgacgtttgcagtccatgggtggagtcctaggaccatagaaacggccatcttgttgaaactattccttttagagaagacagcttcgagatgctgagttacctagacggtgacacagtcgatagtatttgttcatgcagagtgtatagggttctacccagaaacctgtgaaaaccctgacctgatgagttgagcattgtgagcccttagttacgccactgggtgtgtgacagtgaacaggatcttccaagggctttacccagagtggggaaatgggctctaattacccatcaacctatgtacctcatccatagagacagctcagtgatgtttgctgcaaattatgaaacacagcaaaacacagttccttagtcgcaacgtctttggttttctgatctagtagcactctaatgaacatttggggaacactgcacatcctgggaaattctgcaaagtggaagccattccaagctaaacagtgagggaggcatttcaacaatctgctcaactccttcccagcggctgatgagggactccccccaggagactccagcctccagatgactctgctttcgttcatcccttcagctagaattcatcaaccccagggtgctggggatatagccacaaatgagacaaggaagggcctgcccttgtagaatgtgtattataagataaaacagcagtgcttccagaaggaaggaaagcagcaggaggggagcgcagatggaagagggatggagacttttagaagtcgattagagcccaagaccaagacagaggactgacaaggccggagaccactccctgtgctcccttattcaagagtctacacccgttaaaacacctggaggtaaattaataatgggctggtaatgtagatggatcactccttgtggatagatagcgctttccttacaatggctttttcaacacgctgatttcaaacatcatgagtaagaaatgcttgggcctgagagtttctggctccagccaagcgtagtcatctgcccactccatctatgtgtaaaaccaatcttccttttatagctactgtctaatttttaaaaatctcccatcaccgcacctccaaatggctagttctctgacctctgtaattgcatgtgtaattgagagaagaggtttgcaccaagtaagactaatgggggcggggggtctctggacatttgttccattctttgtagtggaaaaaaaaaaaaagaaagaaactttagtgataaccacagaactgcttagtttgccatagcgtatgggacccagaaatggtacttttgggcctaatgacaaccggcacttcttacctgtttctccaccacagacggagacatggtagggactagacggattgaaaatttccctaggactcggccgggaatgactgttttagttccaggctcatcaaaggcaccctcgatgccatggatggagagagacggatacctccacaggtgcatcagaagttcctcctaaaccattcgaagaacaacgtgtgacccaagctcagctgagggctgggactgcagcccagtcaggcagagtgcttgcctagcacacacaaagctcagtgtagtccccaacaccacatcatctgggcctgggggaagatgactttgctcccagcattcgaggtcacccttggctccttagtgagtatgagaccagcttcagctggaagagatcatacttcaaaatcagaaagcaagtcagctgtggttgcatacgcctttaaccccagcacagaaacaggaagagctctgtaaattcaaggccagcctagtctacatagtgagtatcaggccaaccagggaaatacaatgagtctcaaaatagctagacgataaagagagataaggagagggagagagaagatatgattaggggtatagctcaagagtagagtacttgcttagcatgcacagagccagaaagaacttctccctgtcaggggagctggttcaaaaattgaatccagggggctggagagatggctcagcggttaaaagtgctaactgttcttccagaggcccagagttcaattcccagcaaccacatggtgactcacaaccatctgagatgagatctgatgccctcttctggtgtgtctgatgacagctacaatgtactcatttaaataaataaataaacctttaaaaaaatttgaatctgggatcagtgagatgactcagtgggtacaagcactttccagaaagcctgacaacctgaatctaaggaaaaaagtcatttgtggaagcacgcatctgtaatcctaacactccttccataggaatagaggaaggagagaaccaactcctgaatgttatcctctggctccatatgtgtcatacaaacacaccatacattaataacaacaacagtaataataataataataataataataataatggaaaataattttaaaagaaactggatccaattataaatttctaaccagtggtatgcactaatagagaatgtactaaattttatccctcagagcgccttaaataaatcttcagagtttgagccaatttcattcttgtgtagtttcacaaatttagtctgtgagaagacatacactctcacagaaaacactagcacttacaatcagcataatttgccctctctgggcagttcctagggaatcaaccacagctaccaacatctgagtgggaaactatgcttctaagatttaattttgctagtgtgtgtgtgtgtgtgtgtgtgtgtgtgtgtgtgtgaattgtatgagtgtgtgtatgtgcgtatgggtgtgtgtgtggtgcaggtgtagggagttctgtgcatatgaatgtagtacagggcccaaggagggaagaacaggatgtcagatcttttagaactagagttacaggtagccatgagccaaccaacattagagctgcaatctgaactcaggtcctctgcaagatcaatgcatgctcttgagctggacagatggctcagtggttaagagcactgactgctctttctagaggtcctgagttcaattcctagcaaccacatggtggctcacaaccatctgtaataggatccaatttcctcttctggtatgtctgaagacagctactctgtactcatatacataaaataaataaataaataaataaatcttaaaagagagagagagagagcactgactgctcttccagaggtcctgagttcaaatcccagcaaccacctggtggcccacaaccatctataatagggatctgatgccctcttctggtgtgtctgaagacagcaacagtgtacccacatacatgaaataaataaataaataaataaattctaaaaagaaaaagaaaaaaaaacatgcccttaactattaagtcatatctctttagccctcggcaggcaaaatattctttaagaaagaaaaagaaaaaagaaaaaaaaaaggagaaagcaaatgaacaggaattttgaattctttagggatttctgctccgagttttaagtatctttacagcccttggaaggggatgttgtggcttgcccatcagccctgaagggtcttggtaatgcctgagaaggtgaacgattacacgtgttggagctgatgtctcagacagtgactcctaatttttgaacattcagaaagttcagctccctgacagaaagtggaatgggatttaaattaataaactgctgtgaagagacagtgctgccgaatgagtcattattcatggttagatgccgactcctgtaccaactgctccctaggacaacggatccagaccagaggaaagtggccgtgaatgtcaaaactagcctgcaatttaacctttgcctgtggactaagatgcacagacccacactgtgtggtgctgattagacacttgggaaacatgatttgggagcagcatcctcatttggatcatgtgtgtagttatagttataccttggtatcaaacagaaatttctcaacttggttgatgttctggtattcttctaggtccatatcaatgtttttatacattgtcttttctccctctgtaataggtgccatttgatcatagattccaggaattaggatgtggcctgatgaatccaccaggctacctacagaagagatgcagagattacaaatgtgccaatgctgtggtcccagagccaggccaaattaagacaccaccctccaggtggcaaaagtacccccatgtcagcttctgtcccctggccagaaccagtggcaacaattccatttaaccaagaggttgtagtaccaagaaggaactggttacaaggcggactcagcccgagtcagactgctctggtggctaccttgccaagggcagagctgcatattgaatactgttgtgcttccagtcctgggttacaccatcccttcattaacccagggaagagtactgtgtgctaagtaatatgctgtgggtcatgaaaaagaacactgggctacaaagagaaggtttttgcttttatctcaactgtgccaagtcagctggaagatgcagggcagtttcagcttccttgttgtaacacaagaaggaaggcctaagaatcctaaattcattcaaaaatcccttgccaagatggaccacaggctagtcacagtgcagttggcaatggcatacattccagtattccaaacttagagtagccactagctggggatgaagtggcttcttcnnnnnnnnnnnnnnnnnnnnnnnnnnnnnnnnnnnnnnnnnnnnnnnnnnnnnnnnnnnnnnnntcctcctctccccctcctcctcctcctcttcctcttcctcctcctcctccttcttcttcttcctctctctctctctctctctctctctctctctctctctcgcttagtttggtttagtttggtttggtttggtttggtttggtttgagtttcctccccactgctaccttcttaagactcagaacactggcccctacactttctcttccttctgggtgttgcaaatggtgggtgtctatggagaaagaacttgggatgactggtgttttagtatttaataaaccaaattctgttaccaaaactttattttctgtaggaaaaggtgatgttttaaaagataggatagtttaaataggatggctattcaaaccaccacacagcccatctccaatgcaagctgactagtaaaaatgctgagttaaagagctctgggcacaagagactgacaacagatgtcagtctttggtatccatatacatgttcacgcacacacacacacacacacacacatacccctcacacaaatcagaatatacatatgtacatataccccacatatatatgtattaggtagatagatagatagatagatagatagatagatagatagatagagggatggatggatggatagatgggtaagtggagagacagacaaacagatagagggatggatagatggatgaatggatgtcagacagatggacagacaaatggacaggcagatgctgaaggattgaacctggctagtaccaatttgtaatgtatttttaccaaaaacataaaaacatcaccaataatacaatcataaaatcttccttgagcacgcacctctttgtgtttcctcacagtctcaaatgcaaagacaggcggggaaatgtgtgacatgggccctgttataactccagccagataaaaaagccaaggagtcaagcagtacgtatcaagaagatctctgatgaggaatgatgactcaggaggaggggacacaggcagccaacgagaccacatggccaggtagggtagctgatccaaggagattgtgtgcaagatggatgctaacttggcactcaagtttatagaacttggcaggacttttgttattttggtacttttgacaagtagatctgagtactctaggcatcaaaggcagactaactcaaagaaccaggatgctggacttcattcttgatgaagatgatggttacccagatgtcctcagtggactatgctggggtttgagcataactagatttcttgacacacactggattttagaattgtaatatttgttctgcactgccatcttccccactacagactgagagaaatgcctgtgagcatagatgttgactgaggaaagatgctttgcccatcttttcctcccttgtagttcacccacagtgaaatctgattaaggagatcatagaggtgcccccccccccagggaccgtggaatgttcacatctgctagttagaagtaatcttccattagggaaactatatccttattcaccactgatacacttgctccatttagaggtcacccctcccttccttctcactttccatggatatcatgatcctgagaccataaagtcactttggaaagcacacggaagagaaaggagctgtcttggaagcatcatcgttgctcccaggagaattttgacattctaaatgatattagatactaggtatctatgatgcctttgacaaccaggcatggtggctcacacctccctcaatctcagtacttggaaggggaaggcaagatgattcaatatctcatggtcaatcctgtctcaaaagatgagaaaaacagggctagggctagggctagggttcagttgatacagtgcttccccagcatttctgaagccctgggctgcatctctagtactgcatgagccacgcgtggcagtgcatgtccatcaacccagctctcaggcaggagtatcaagagttcaaagccatctttgatttcatactgagtttaaggccaacctaagctacaagggaccctgtctgaaccataccaaacaaaaacaaacaaaggcagtagaaagaagaaaaaccgctttggggtcaatggcctttccactgtcctcatggtctttaaaaattgcacagtagaaaaactgaaaaggagaaactgctggttgctggagattaatctgtgagcacagtattccattcttcccgctctctgcctacccaacctatgactttttgaggcagggaacttatttgattctatattgttccccatctggggttagcataggctttacccacttggtgtccggtgagcatttgttactgttgctcatcgtgatgctcaccagcatcctgccccatgatgatggcagaggatgatgaaggccagagacttgcattaaaccaggatggctctggattctcagcctctggtgaatatgtgttcattactggtcagtcattggggaaggacataagacaaccagctcccccaagacattgtgacctgatgtaaccctaagccagtgcactggatttagtctcctgctgaggtttctccaccacagcccagcacagcacagcacagcacagcccagcccagcccagcccagcacagcacagcccagcacagcccagcacagcacagcccagcccagcccagcccagcacagcccagcccagcacagcacagcccagcccagcccagcccagcacagcacagcacagcccagcccagcccagcccagcacagcacagcccagcccagcccagcacagcccagcacagcacagcacagcacagcacagcacagcacagcatgccagcaagcaaaattccccttagtttaactgacattagcaatcgactttgtatccccttgattctgtgcaaagcactcagaaagcaggcgtatggagagcaaatccagaaggtaagttatcgtggactgtttgggttgcaccaaaagcagacagaagaataacctttggttttattccacttaggagcttttccttggcaaagcaacacatatatatgaagttaagtgtaactccgtgcctggcttaaagctacaagtctaacattctaacgagatgttagacttcccctcaggcttcacatctgagggaaagcttgagatacattgcttgggatttagcaatatggaggaataggatttattctcagcaccttggagctaagacaggaggattgttataaattttaggccagcctggactacagtgtaacactatgaaaaataaataaatatttgatgatgataaaaggaaagaggaattaatctggcaaaatgattaactatccttgctccaaaatattaagttgcttatctgaattctttaaaggtaaaaatattattgtattcttgctgaagttgtcaaacatgagatattgcctatgtatattactgtcttagaaaaaattaaaaatacatagataataggtatgtagccagctaaataatggatatatatagataaatagatagacatagattatagatagatagattgattgattgatagatgatacatagataggtaattaagatgtaggttgatttcactgtttaattttaatttggggtcatgatggaggaaatgctataaataaagatattgatgaagaacttgattagaccctctagcagtttgtccatgcaagctgcttatattctgtctggtactaagtaggccagggtaggggttgacatgtaggttttggacaatttatctgtcccaaaggaaaaagtttgcatagagaacacaatcccagatgtagcaaactgaggtattgtgcaacttgtgaaccttgaaatcaaatccatcaagtgtggctacacccccgtgaagatcccccacgaggtctgtggaagaggcttctacaagcaaggcccctcaagggactctacttaggcagcattagtgctgacaagagctaccagatagatcaagcctgagaaagttggatctctgagaacacctctctttgcacaggctagtcagccttgcaggaggtcaggagcagaggtttggtgaacttcagtcgacaaacacagtggcatctctgtgccagtcaaccttggaaagtgatgccaagtagcatccagatatttggcactatcatctctggagtccttggtaagataagagctgtttttcctggccagagcagaccattgatcatctctggatactccatacacatcctaccatatcctcaaaataacacttacgtgctggctagttttatgtcaacttgacacagctgtgatcatctgagaggaggtattcccaattaagacaatgcctaaataaatcaagctacaggcaagcctgtggggcatctccttaattggtgattgatgtgggagggtccattccatggtgggtggggccacccctggtctgatggtcctggctgctataagaaaacaggctaagcaagccatgaagagcaagcccgtaagcaacacccttctatggcctatgcaacagctcctgcttccagtgtcctgccctgtttgagtttctgtcctgacttccttcaacaatgaacagtgatgtggaagcataagtcaaacaaacccttcccttcccccagttgctattggtcatggtttttcatgacaccaatagttaagacttataggtgaacatataatgatgcctacttccaactgggaaaactcaaaacgaaataattgaggtaactcactgaattccatgcagctgacctgtgacagtgcatggccacagctagctactcccaccaagaacatacttgatccctgggttccgagggctggactgtcatgggttccacttatggcacagaggctgctgggatagggcctcactcacaacatcacgtaactctgttctgagttgttgtcatttatctgcagtcagaaagtcctcctttgcctatgaagatggcatctgtacttcaactggcttggggctgtcatttctgtcctcttgctctagaagcactggagggagtcaggggtggcgcctataacttcttcaggtctctatatccccttatatttgtgtatggccagatatattataatacccaataaaaggaggtttgggggctgcagagatggaccgggcagtaagtgcttgccacggaagcatggggactcgcatttgataccttagacccatgtaaaaaaaatatggacactgtgccagggaaaatggcacacacctttaatttaaaaaatcaagaagctcaggcagacagatctctatgagtctaagatcagtctggtctccatagcaagcttcaggctagctaaggctgaagcatgaaaccctgtctcaaaagataaaattctgggcacagtgacaaattcagctctggggatgcagacataaaagtctcttgtagcctagtcagattagcctacttggtaagctctgcattctaatatctcaataataaaaaggacaacacctgagaaatgaggaatcatgcccaagattgacctctggcctccacatgcatgcccacatacatgcaatgtgcacactggtgaacctgcacatatatacatgtatacagaatgcacaacttttaaaaataaataagtaaatagaaaataaatcagagcagacttatcagttcatgaaaagaaataacacacagcgcgggctcataacaagcctagaaagcacaagggagggaagaaaagattaagcattaagcatatagttttactattactataaagttttccagagatgatccagaaaccaaggagaacaaaacagaattctcttttgtgcagaacgcattactacctagaagagcaaccaagtcagccattggttcgttgaggatgccaccaaaggttcctgagtggaaatcttgatctctacacttcacctgtaaagtagatcgaagagaataaatttacccacgctgtggttcctttgtgcacggtggaaggtatgcctagtgctgtccttcaggactcaggggagcaacctccagacctgacctcacatcctatgtttcccagtcacatgacttggggctctttattccccagctactctaccagcacagttctatctaagatgaccaaaccatccttgggtgaaatactgctgttcatatcgctggatggcccttagctttgtctcatgctctttaggtcacgtcttaggaggagaatgcttcctccttgatttctgggaagtctttctctttttgctcacagtggtttctttctcttttcagttgtactcaattctttgatacctcctttaataactctctctctctctctctctctctctctctctctctctccctgtctgagtgagtgtttttggtatggtgactgtatgggtgtgtatgtacctatgtgcaagggtgtgtattgtgtacagagaattgtgtcagagaagaatgtcatcaggtgtctccctttacgctctccactttagtccctggaggtaggatctctcactgaacccgaagttcactgatttgcctatggcagctggccaatcccccagtgctagagttatagacacccatggtcatatccagctttacacggataatggctaattcagaccctgatgcgtgcacagcaagtactcttacccagagtcatttccttagttttcctctcatgattctcttctgactatctcccctacagcttcctccatgactgattttgtctcagaagcttggagtagctcacagtgtcatttaccacctcctacctctcagttgtcttcctcatagctctgaaccttttgtctaaacccagacctaaaactgcagttggtccgagtgaacgctcttccagtttctgaagacctggagcggaactcagcgtctacagttacttcattccagcttgagcacatccccattggttaccacgtaagccttaagtatgtctctggtcccttttctcttgccatgcctgcccagcagtctttccctgctctcacacaccctttgtggaaggcaagtctcccgtttggtcacttcagagtgaaggttcactttattagccactcagactaactaaattgtgctgggttgacagcctcacatctgaaatcctgagtgacctgtcctgctacttctctgaccattcttggtcctcattaggatgtccagttctttggttttgttttcctccatttgtgctcatgactgccagtgttctgtggtctccgtagggatacattttcactactctacatcacaactaacagtctcatcgagctctcgaacacagagcacagtcatccatctacatggacacacacaacgccaaacctttaagccatgtgctctatgttgggtctcttattcacagctatgcccatggccatcattttgctctgtgtaaatcattttcctgcccagcagggggcggtcgacagcaaaacacactgctccaccatcttcactctttgtctacctgacacttttctcaagagaggctaattccttcccttggcaaagattttatctctcaccacctcctcggtgcctctgttcttcctttcccctgcctcgggaaggttttctggcatccgatctgtgctccttccagccatgaccccgttgcttcttctcacattagctttgttgacaaacatttctaccgggcatctcagcttctgcttcctgttttcccagcattctcacctcatccctctagtccctgggtctcttcacagtgaattccctgtaagctgaggctgacttactcactcctatgccccaggattcacatcagcacatttaacaaagagaacatgctgttttcttcttctccctttcttttttcctctcctcttcttccctctcctcttcttctgccttctccatcttccccctctctcttctctgtccctctttcactctgggatggaaccagaggtctcatgcacactagaaaaccaaacgctttttcatgaactatatccacaagccttgccttttcaattataaaaatgcatattgtcatttaaaaaaatcataaagatgcaagatatttatatctggtccaaacccttttcatttgttttgtttgtttcgatacagagtctcactatgtattcctgggtctcctggaactccctttgtagaccaggctggccttgaccccacagagatctatcttcctgcctctcctctcctcctgagtcctggggtaaaggtctgtgctaccacgcctagccagtccataagtctcaaccgtcatttaactctcataagtgcctacgtttggatatttccatcatgtccactaaagtctgttatgtgagaaaactaaagtggctaactaatgatgcacccaagagggactttatactataaactgtacgctctatcactggttgcctgtattgcttgggtaagggaattgtactaacttttgagataggaaactaaagctcagatgtaaaggcatctacccaaggctgtgtgtcacagaatggccttggatgccatcagccttctattgcctcttgaccgtagcactatggtcctctgccaccaaggcctgcaggcacacaacagggaatgttacaacaggctagcctagcttctgactaggtagtcatcttggtaggtattactcctgccttcagatcctatagccacagatctgagagaaacctctaggactctagagtaaatacactcaagcaaaaacactcaagcatattcactctaagatttcaggggtttgtgagccacaccctcaagccccaagtgacctcccaggccatgagccccaagggagaatgtcctgactttttcttcaaggtcctccgtaattcccctatcctgtccagagctcctgtctccctccacaggcagagcctgtggtacctccaccgtgaagtagcagttcccccgggttccataagtgagtgcaggtttcctctggctgagccacaggttgtctgaaatcacaatgtagtccacactggagaagaagtggtccttttctctcatgacgagttcctccagggcgatggaaccggcttcttccattccctccaggatgagtttgatgttcacgggaagatcctggattaacaacagagcaaagagattgtaggtcttatggataagtgcatacctgatacagacacatgaagtaatcatccatactcaacgtgtggattgcgtaccatcccagcagctctgtttacagcagcagagaagaaggaaagttaaggccagcaggtagattccacgtggagctttgatttaatgctaggacagaatttggtacagagaccccaaagatggcagcatccattctgcacagcttgactgattcaaaaggtcggcgtggcaggatggaacaggaagggacagggcagaggcatcctttcccataaaagaaaggaactctgtgtgtgtgtgtgtgtgtgtgtgtatgtgtgtgtgtgatatgtgtgtatacaggtgtgtcaggtgtgtgcacatgcatgtggaggccagggatctatgtataatgtattcttcagttattctccaccttaatttcaatttcttctcttctcttctcttctcttctcttctcttctcttctnnnnnnnnnnnnnnnnnnnnnnnnnnnnnnnnnnnnnnnnnnnnnnnnnnnnnnnnnnnnnnnnnnnnnnnnnnnnnnnnnnnnnnnnnnnnnnnnnnnnnnnnnnnnnnnnnnnnnnnnnnnnnnnnnnnnnnnnnnnnnnnnnnnnnnnnnnnnnnnnnnnnnnnnnnnnnnnnnnnnnnnnnnnnnnnnnnnnnnnnnnnnnnnnnnnnnnnnnnnnnnnnnnnnnnnnnnnnnnnnnnnnnnnnnnnnnnnnnnnnnnnnnnnnnnnnnnnnnnnnnnnnnnnnnnnnnnnnnnnnnnnnnnnnnnnnnnnnnnnnnnnnnnnnnnnnnnnnnnnnnnnnnnnnnnnnnnnnnnnnnnnnnnnnnnnnnnnnnnnnnnnnnnnnnnnnnnnnnnnnnnnnnnnnnnnnnnnnnnnnnnnnnnnnnnnnnnnnnnnnnnnnnnnnnnnnnnnnnnnnnnnnnnnnnnnnnnnnnnnnnnnnnnnnnnnnnnnnnnnnnnnnnnnnnnnnnnnnnnnnnnnnnnnnnnnnnnnnnnnnnnnnnnnnnnnnnnnnnnnnnnnnnnnnnnnnnnnnnnnnnnnnnnnnnnnnnnnnnnnnnnnnnnnnnnnnnnnnnnnnnnnnnnnnnnnnnnnnnnnnnnnnnnnnnnnnnnnnnnnnnnnnnnnnnnnnnnnnnnnnnnnnnnnnnnnnnnnnnnnnnnnnnnnnnnnnnnnnnnnnnnnnnnnnnnnnnnnnnnnnnnnnnnnnnnnnnnnnnnnnnnnnnnnnnnnnnnnnnnnnnnnnnnnnnnnnnnnnnnnnnnnnnnnnnnnnnnnnnnnnnnnnnnnnnnnnnnnnnnnnnnnnnnnnnnnnnnnnnnnnnnnnnnnnnnnnnnnnnnnnnnnnnnnnnnnnnnnnnnnnnnnnnnnnnnnnnnnnnnnnnnnnnnnnnnnnnnnnnnnnnnnnnnnnnnnnnnnnnnnnnnnnnnnnnnnnnnnnnnnnnnnnnnnnnnnnnnnnnnnnnnnnnnnnnnnnnnnnnnnnnnnnnnnnnnnnnnnnnnnnnnnnnnnnnnnnnnnnnnnnnnnnnnnnnnnnnnnnnnnnnnnnnnnnnnnnnnnnnnnnnnnnnnnnnnnnnnnnnnnnnnnnnnnnnnnnnnnnnnnnnnnnnnnnnnnnnnnnnnnnnnnnnnnnnnnnnnnnnnnnnnnnnnnnnnnnnnnnnnnnnnnnnnnnnnnnnnnnnnnnnnnnnnnnnnnnnnnnnnnnnnnnnnnnnnnnnnnnnnnnnnnnnnnnnnnnnnnnnnnnnnnnnnnnnnnnnnnnnnnnnnnnnnnnnnnnnnnnnnnnnnnnnnnnnnnnnnnnnnnnnnnnnnnnnnnnnnnnnnnnnnnnnnnnnnnnnnnnnnnnnnnnnnnnnnnnnnnnnnnnnnnnnnnnnnnnnnnnnnnnnnnnnnnnnnnnnnnnnnnnnnnnnnnnnnnnnnnnnnnnnnnnnnnnnnnnnnnnnnnnnnnnnnnnnnnnnnnnnnnnnnnnnnnnnnnnnnnnnnnnnnnnnnnnnnnnnnnnnnnnncccccccccggctttatattctgagtaagttccccaggtcttacttttctttctaaaacagttgtggcatgatacacactcaagattgttgtggaaaagtgagtacacactgcggtgctccgagaactccgtcacctctctcaagcacagccggccacctacctgctgcagagctctgaaggtgctcacggcattgatccaagccaagacggggcccttgttgtctgttgctccccgtccatacagtttcccttttaaaacggaaggaggaaaatttcaatatggtacagggatgtctgctataggaactcaaattctgagataaaaaaaaaaaaaacaaaaaaaacaatccgcacctgtgttagaaatttctacaaagtcaagtgactgaactttgtgtttatggttagttaaaatactgcagaccaaagccaaacattttgggatctttttagtcctcttgggactcatttgtttcccacccctgtatctgacctgaacatccttatgaacctcaaagcttggagaatgtgtgttgaggagactccaagcttcaccagtccacaagaaaatcatgtcatcagataacatctgaaacctatgcagattctttcccctgacttaggtggcccacctatgtgtggtctctggcaatgcatctgtcagaagtgatgactttctttgttctcaaacaacctcttctacagtagagcatgttcttttgagaactgtgaatctgctatcctgggccatggtcattcatatttggctccagaataaactgtcctctaaaaagatttttattttattttattttattttactttatatgtgtagttgttgttttgctagcttgagacattgtctaaaaaaatacccagcaaaataaacaaaagaaatttaaggcataaattcttatatacaaataggatcctcaacagtcatacacgacaagctagtttaagcacacatgactagtcttagaagaactcagctgttttgttcaagttccttgatattcctaagagtttgctgttcaacagtacccaacatagtctcttgcgctgagatctgtctactggaagaataatgaaatagagatgtgtgtctatctctattggctcttcttcttcctttctttacaaaatacaaattcgccatgctaaaaaatttgtgatctatctatctatctatctatctatctatctatctatctatctatccatccatccatccatctatctatctatctatctatctatctatctatctatctatctatctatctatttgtctgtgtctgtgtgtgtgtgtgtgtgtgtgtgtgtgtgtgtgtgtgtgtgtgtgttatcaaatataggacctggagtatgtaggtcagtcactttactaatgatcaatatctttggtcttttcccaattttatttggggatatggtctcaatcagttgcccaggatggtctcaaattcactttgaagcacaggtttggcttgaaactatgattctttctccagcctcctgagtatctgggtatagtcctgaaccaccagacctagctctgctcatttgtaaccatagctaaaagccatgagtctttgatcggtgtcaagccttgactacagacgtgttccacctagggaccagatgatactgaccatccacctctgtcagtgtgtaggggtccgtgagccacccgtcgtccttctgagctggctgcacgtccaggtgcccatagaagcatacagttggcttctcgggatcacttcccagctcagccaataggataggaggtatggggagactctgaccatcaggcatctgtggatcacaacattagagcaagcaagcaaaactcaaagagaacgtactctctcttcttctagaacattcaaaacagactcctgtctactctatccttgagtccctgtaaagcgtatatcaggttttctgagcatactttctccatctctcaagatggagaaagattttatctatctatctatctatctatctatctatctatctatctatctatctatctatgatgagtacactgtagctgtcttcagacacaccagaagaggacatcatatcccattacagatagttgtgagccaccatgtggttgctgggacttgaactcaggacctctggaagagcattcagtgctcttaaccactgagccatctctccagcccccatgatgcatgcctttattcctaggtctaaagaaccaaagcaggcagatctctttgcctttgtaccagcctggtctacagagtgaggtctagaccagccaaggctacatggtgagagtctgtcccaaataaataaataagtaaataagtaaataaataaataaataaatccacaaaacaaaaatgtataccatgatatccttcaaataactagcgtcgttggaatataaattattgtattccattataaaaattggaattatgataatcagtaattattcgatatacaatgccaaattgtataaagttgtttggaaatattcttcaagaactcagatctcaaatggcttaaagcagcagatctttcaaatccgggaaatctaaccttgatgattgtaaagttctcggtgctaaaggaggagacattgggtgctttaatgcagatgtgccatggaagaatggcagacagttcaacggttctgtgctgttttcatatcaacttgacacaagttagagttatgtaaaaggagggagtctgaattgagaaaatgcctctacaagatccagatatggggcattttcttagctagtgattggttggggaggacccatcccattgtaagtgaggcctagttgtcttgggtgctataagaaagcaggctgagcaagccctgaatgtgagccagtaagtagcacccctccatggcttctgcatcagctcctgcctccaggattcagccctgcttgagttcctgtcctgacttagttcaatgatgaacagtgatgtggaagtgtaagccacaaaagcctttttcttcccaagctgctttttggtcatggtgtttcttggcagcaatggaaaccctaactaggaaggttccagggaaagagcacactcttcaaacagtcctttcagggaccctcctgtgcacgcaagaagaggcaaggcgaaagtgctcagagaacgagaggggcgggtcttccaataacaaactgacccacactcatggccttcactttcttcttcacctgcccccagtcctgctatgaccagaagcccacagcacagtctcattttagactagatggaacatttcattcttatgggcaacctggactctgtggggattgcagtgagggtctgagtaagtgcttctcttgacaccacctcaggatgatggttgtagacatggagtttcccgagctggaaggagacccctggtacctgctgagaacccaagtctatggactccaccccagctcccaggttccggagtttgtctgcagccaaggccatcatctggaagagcttctgtctgagacgaggcacaggctgcacagaatcactctcaatggccacccactccttcagtgtctgtgaggaaacacaatgagggggttatcaggtagggtacaagagcccttgtccagttgtgcaggggctggtgggagccaagcccctcaatgctcttcagctcttgggatccttcagatcagtttaaaaactcagggatgctaaacagcaagtgttggagtgaagcaatatctcagctgtgaagatttacaagtgtgcgaaccctaactcagttcctcagaggtggctttgtaaaacgttagctggacagtgtggtgcacgcctgtaatcctagaacaggtaaggcaaagatcctggaggctcaatggctatccagctgaggctgtttggtaagttagtaagaccctggtttcaaaacaaacaaacaaacaaacaaacaaacaaaaaacatcaacaaaaacaaaaaatagcaaagtggacagcccctgaggaaatcacaaaatgttgatcattgtcttacacatagacacacacacaaacacacacacacaaacacacacacacacacacacacacactcacacacacacactcacacttgatggatgagcttagggtttaatcaaaaacctggagaccagagcatctgatactaaagatgaggtaggataggttgagagaatgcagtcagccttttcctacatgtttgatcctccaggcagcatggccaggatgtgaactcatcaatgtatgagtttagtcctccaacccacctcagcccggagcattacaagactttgagaactccttagtaaggttactcgccagtggaataattcataatcatcactcatggtccagagttggaacctgaattgcttaagcaaaaaaaaaaaaaaaaaaattggggggtggagtggggggtactatgtaaaccagaatgactgagagcttgtgagaatcctttgatctctgcctcccaggtgctgggatcacaggtgtgcacccacatgccctgcagaacaccaccgttgttaatgggaaaacagaacatggtgtcagtttaggacagctgattttgactctgctgtttacttgtttgatttctcttccctggttataacatttacattttttatcataggagaatttatttagggaatgttaggtttcccatttttcacccagattgtgtagagcaggagctgctgacactaaccaccaccccacccccaccttcctgggagagaatgacaagtttgaggaagctggaagagaggatattctgatagaaagaccacacccaccctcagctcccacgagacaccacatctcaattaactctggaatttctgtttgaattccagaaatctaggaggtctttctgtcaggtgaccgttgcagaacgggaatgaggacctggaggccacacttaggaacattgacctggggagtccatgttgtgcctttgcttgaagcacaaaggctttgtctctgtttgcatgacaatattcttaatattggctgatggatgcaaccatggactaacatggtattgggggcatagaacacgaagtctagtgagactcaaaggaggcactagatgcatgaaattggtgtgggaagtcaagcacagtggtctacacctacagttctagcacctgagaggcagaggcagcaggatcaggaatccaaggttattctccaccaggtgttgaggtcagaatagcctgggctacatgtgaccctgtgggtaagctgtggtcatgggcctaggtgccaacagaagggacaagagcccatccaaggggaatggggggaagggaagttgtccagtgagacataggacctgcacctactacatctctcctactgctcccctcctctttttgctccccaggactctttctcttcatcttctcctgtcctcatctcccccacgtgtccacccccacatcctgctggcactgaagtggagctgattctcctgctccatctaggtatctctggcaactaagaaattttgtcagtaggctccttgatgggctagagtaatcataatctccacagaggtgctgtgaataccagccagggatggagagtgtctttctagagctcagcactaagggatctctgccacaaatctaatgagccctgatatttttattccagtaagaatttatcaccattttgagtggaatcatatctccaggcacaacattccacatctcccagtaaatagctgccaccaggttctgaagggaataggcggggcctcacgtgtgacttctcctacctgcacgaactcatcctggtggaggtctatgtagtggaagagcttctccaacagcccagagtgtgccgaagagaacattgcctgctccagctgtagtgccgagagagacgaagcctgtgattggcccacagcagcagtgccgagagagacgaagcctgtgggttggcaacaatgagactaaatgccagcattgggcttctgacctttcaaatgctttcataatattgctacccaatctagaataagcatctcatcaaatttccaagggatgggaaatcacagtcactgagggacaacagcagtcttggctagagtttcatttcctcatgaacactggcagaatatgtgaatgtgaacattaggagaaaaaggaacactgaattaatgcttagattatttagattagtttagaaaattttttgcatcatttattaaatgctttctgagaatgtaaacttaaagcgattaagctgctttcgatatgttcttggattcagtttacaagcattttatttaaaatgtgtctatgtttatctgaaaaaagaaattgctacccaaagctgccgctccacatgacttggattaaaataaccagagggtggaaccagaagtgctcctcacaccattcctcataagcttccttttcaaagcgaatggatttttaaatactgttaaagattacattaaatttaattaattagttttttatgggcatgggtgttttcactacatgtctggctgtgtaccatgtccatgcctagtgctcatgaaggagcactttagacgctatgggactagagtacaaatggttatgagctgcctgtgggtgctggggattgaacctgggtcctgtgaaagagcaaccagtgctcttaactactgagccattcctcctcctctccctcctcctcttcctctttcttcttttcttattcttgttttgaggactccatacatgaatacttcatctacatcactctcccctccctacttgccctccatctcctcctacatccccctactcttctgctctgctcttctcttctctgctcttctcttctcttctcttctcttctcttctcttctcttctcttctcttctcttctcttctcttctcttctcttcccttcccttcccttcccttcccttcccttcccttcccttccccttccttccttccttccttccttccttcctttctttctttctttctttctttctttctttctttctttctttttttctttctgttttgttgtttgtttgtttgtttgtttgtttgagtcaggtttctctgtgtagtcctggctgtcttggacctcactctgtagaccaggttgtcctgaaactcagagattcacctgcttctgcctcccatattcccaaatgctgagattaaaggtgtgagccactaccaatgaacaaaggcacatgctgcatttatttatttatttattggctaaggtttnnnnnnnnnnnnnnnnnnnnnnnnnnnnnnnnnnnnnnnnnnnnnnnnnnnnnnnnnnnnnnnnnnnnnnnnnnnnnnnnnnnnnnnnnnnnnnnnnnnnnnnnnnnnnnnnnnnnnnnnnnnnnnnnnnnnnnnnnnnnnnnnnnnnnnnnnnnnnnnnnnnnnnnnnnnnnnnnnnnnnnnnnnnnnnnnnnnnnnnnnnnnnnnnnnnnnnnnnnnnnnnnnnnnnnnnnnnnnnnnngaaagggagggagggagagaggaggagggaaagggagggagggagagaggagggagaggaagagggagagggagggagggagagagagctaactgagagtggcatgggatttgaaactgtaaagcacccccatgacacctcctccaacaggcctaatccttcccaaacagttccaccaaatcagtgtttctcaacctgtgggtcgcaaccccttgcacattgttcacctaagaccatggggaaaacacaaatatacattatgttttataatagaagcaaaattgcagttagaagtagcaacaaaaatatgtttatggtatgggggtctccaccacatgggaaactgcatccaagggtctcagcatcaggaggttgacgaccactgcgacaactgtttccaaacacatgatcttatggaagctattctcattcaaacacaggtaacccgctgagtttgtttactattgctaatatgtacacacatctagggctgaccacatggggttggacaacccatctagtagcttgttcctggaggaaactgattctcccactcttagcaaccacttgtgccagggcccagctttaacacgagttgggggttgtcaagatctaaggatacctggtaggagaataagaaaacacatcaattgagcaaactgacaggattgttctttccatctctcctttaatgttttctaagggctacattgtagatatatctaaggtttgggtataggggctgcattgcagatgtttctaagacttgggtatggttacattgtagatgtatctaaagcttgggtatggttacattgtagatgtatctaaggcttgggtatggttacattgtagatgtatctaaggcttgggtatggttacattgtagatgtatctaaggcttgggtatggttacattgtagatatatctaaggcttgggtatggttacattgtagatgtatctaaggcttgggtatggttacattgtagatgtatctaagggtacagggttacattgtagatgtatctaaggcttgggtatggttacattgtagatgtatctaaggcttgggtatggttacattgtagatatatctaaggcttgggtatggttacattgtagatgtatcaaaggcttgggtatggttacattgtagatgtatctaaggcttgggtatggttacattgtagatgtatctaaggcttgggtatggttacattgtagatgtatctaagggtacaggcttacattgtagatgtatctaaggcttggctataacgttacattgtagatgtatgtaaggcttaggtatagggttgcattgtagatgtatcagcttgggcttggcaccctgcagtcacttgttatctgcattttgactggctgtggacttctgtaacagtcttcagctgtagcaaaaagaagcttcttgggggctggaaagatgatcagcagttaagagcattgttttatcttacagaggacctgggttcggtttccagcactcacagggcagctcacaactgtctgtaactccagttctaagggatccgaaaccctcacacagacataggtgcaggctaaacaccaaggcacgttaaacaacaacaacaacaacaacaacaaaacaacaacaacaacaacaacaaaacaatttagaagagaagccacgtatctgtgggtatgcgaatatttggaatgcagtttgtaatcacggttgtttagggaagtgacaacagtaaattctcttctagggtctatgacctctttagccacaggcagccggctaggctaacgttgccaggtatgagttcttcccatcaagcaggccataaggctgatcacacagctgttaattactctagaggtgtgagcatcctttttgcaccatcaaggatatcatgaaggtctagcttcacagactccacacctgggtaggatgactgatctctcctctcccttggcagcttgcatggcaccttctgataccaatggtttttaatgagacctcaaaggcttcaaaaccatcttgtacacccagcggagacatggatgctagtggtaattatggcagtcaatgagtttgtctttaagccaggaaactcaagttattcctgcaatacaatctaacccctggtttatctcccataaacgaagccagttctgaaagaaaagtgtgtgtgtgtgtggggggggggagctttgctggtgaaagaggggagcaccaggggaaacctagcagacgtgcatggaaaaacctcataatgcctgaattctgtgcagaatggtggggtttcctccccagctcctacaactggagtgtcctaaaacacaaagagaagaaacttagaagtttccctgttataggtaacactgagaagcagccatagccagggaatatcctctgtttctggtctgtgtcttttagccagtctcttactctgtgctatgacatactctttctttcccctccctggtctctaaagaggtcctgtgcacaagccactgtcccccatcttcttcctagtcctctaatatgtcattcccactctcaggccactcctggggaatgactctaccctgatcttggatacctttagggaaaaattccctccttggcctggacatgatcctcagtcaatttgactgaatctgcacctgggtgacacatttagaacctgtctataacataatacaatacaatacaatacaatacaatacaatacaatacaatatgacaaattagcaagggtgccaagatattgctactgaggaaaaagcaaacccacaactcagtgtttcatgtgagtaaagtggccaagaatcaaagttggatagcgagcactggtgcaggggtggagaaactggatccttcatatgctgatggtaaaaactgctgggccagcaagattgctcatcaagcaaaggcccttttcacggaggctgacaacctgagttcaagtccctagacccaaacagtgggaaaaaaacaacccatttccaatacacacacacacacacacacacacacacacacacacacacacactgtacagcacctgccctgtcctgtttccagtaaataaataaacataaaaacaaatagtaaaattatacaactctttgaaaaaaaaatagtctggtctgatgtggtggtatatgcctttgatcccagcactctcagaagcagaagcaggctgaggcagaggcagatctctgtgagttcaaggccagccttgtctacatagtaagtcccaagacagccagagctacataacagagagattctgtctccaacaaacaaacaaacaaacaaacaaacaaacaaacaaacaaaggaaacaaaactaaaaaagaaccctaaaggcaaagcagtttgactgttgtgcacataattaaacatgtttctgtatgacccaacaattctactctgagtcatatactcaagagaaatagaatgtttacacacacacacacacacacacacacacacacacacacacacaccttgaaaaaatggttacaacactgttccttatagtagccaaaaggcagaaccagaccaagaagccatcatcagatgactggataaacaaaggctgtgtgtccctgcaatgaaatattatttggctgatgaaaatgataagatacctggtcataaaaggtgttggtggggttagggatagttttggaagtgatcagttgccttgacaatatagtgctgacataagccagacataaggactacttattgaatgcttccctttatgtaaaagaccagaatagatcaatacatggagccaggagccagggagtagttactagggtgaaggagactgtcattgttaatgaggaagaagtttcctttcagtgagaatgttctaaaatggactgtggtaatggtgattcaaccctgtgaatatactaaaaaacaaacaaacaacccacagcaacaacaaaaccccccaaaacacaatacacaaatagtagaactgagtgctttacctggctaaattgtaagccatgtgcattaagatacagatgtaaagtacctgtcatccatgtaccactcacttgactattactgagtatgagaaatgtgtaagcagagaggttgagccttgttgttgatggaatcagctttggccagcaggtggcactactggcctgttcctgactcaagcaacaatccagacacagccagttcagctaagtcctaatgccaaggggtaaatgaaatgaaccctgtgggaaacaacctgatgctgttatcttttcctttcagctctgggggctcaacgagggccgtgtacaaatgttataacatcaagttacatctccaatctcagacagaaaggttcttggcaagccgttgtctagattaacatttgaacttattccttatccagtcattactaagaaggttttaattaaaatgtttttattaattctttgagaatttatgaaatttaatcatgttcattcctagcccttctcctaatgcctcccaaatacacctcaccttctccagttgcgtgtctttttttttttttttttgtaagtaacccatccagtcaacctgtgttgttcatgtactcctaggtatgggatcatgcacttgaacatggtagactaccaggggccacacacttaaagaaaaatgcctcttcttcagaacccagcaactatccatgtgcctcaggtaggatgggggctcaggaacccatttccctcaaaaaaaaaaaaaaagtaggggaggttatttttcaaaagaaaagagattggacatggtggcacacacctttaatcccagcacttcagaggcagaggcaggtggatctctgtgactttgaggccaacctggtctacagcataagttccaggacgtccagggcttcatagttagaccctgttttaaaatacagaagaaggagaaagagaaggaggaggaggaaaaggaaaaagtggaggaagaagaggagaaggaggagagtttgaggggaaagaaaaagaccacaggaagagaaggaaattgctctcaaatctttaggtacaaggactgagatttcatagtttcatgaagccaccagggaccaaggtctgtccttgggggttaactagaagtggcggtcctgagagtaaggcagataaaggagcttgctggcacactctttacttctgtgcccattttgggtccctttctcttctgcttacagagttggacagaacttgctgctaagcatttggtccaggtcaccaaggtagactttgggcagtgggggcctactttccttgtcctgaatgggatcccaggtgtgatcccttggttgtctcctcttgttccctgatctctggtgtgtgtgtgtctgtgtgtgtctctctatgtgtgtttgtgtgtctgtgtgtgtttgtatggggcattgggctatacacaggcagtctggtttccagtcgagctgagatgttgaaccctgggacccggtggtgataactcacctacatgggatggaaggagttctttcatgtctcctggaactctggctcctgttgaagttaccaccccctcagctcccacaagagaagtatggctagcagtcaagtaggcaatgtcccaagcttctgaccttcaggctaaactcctccccagtttcctagcaacagcaaagaccataagaagggttgcttggccccaccttgctctcttactcctcactctctctctcctctctctttgtcttctcctctcctctctcctctctcttgctctctctccctcttattctctagcctttcatctctctctccctttcccctttgtctcctcttggccatggccagtctctctctctctctctctctctctctctctctctctctctctctctctctcttttctaccttctctctttccctctgcctttctataataaagctctaaaaccatagacagtctctgctcctcaaggccactgtgcagactctcccctgtgtggcaacctctctctctatgccctctctcccataaccccggggctacagggtgttgccccaggcccccagtcgggggctgccccttatccaccacccaccaccccccatcgagtggggtcagacagaggcttagatgtccacctggggcccgagtgcgtctggcagtcctcccgagtccgtctgcccagagcttaggaggaactcaggccaggagcgggctatcctcccttccccctctttccccagcccccttttagttcccacatgtttgtgtctgtgtgtgtctgtgtgcatctatatctctctctctctctctgtgtgtgtgtgtgtgtgtgtgtgtgtgtgtgtgtgtgtgtgtgtattatagtcattctgtgtctcgagccattctactcttggcttctgtgtttgcacaaagagctgagcaacaggaagggagactggacatgtgagggttctggagcagaggcttggctcggtgcttcttcagatgactgggttcctgcttactagtgctggttgcagtgtgtgtggaacaaaggttcccagtgccccagtcttagcttcagatactaaattcctcctagggcatcctcagccctgccatgctgcccaccttccctaaggagcagatcctcaaaatcttcttagcttttccacatggcaaagtcacaaatactacaagtttctataccatctggtactgtagtccaatcagccaatatgactcagaatgcgttttcttcaatgaaagatggaagcctacacacttccgaaaggcgatgctgacaaaggggcccagtttggaggattgtaatcaggcttctgtgacgctgagtggagtcataaggcatgcatatcattagacagctgctgctcagacttcctacccggtatcacatcatatggtatgacatcatatggtatgacatcatatggtatgacatcatatggtatgacatcatatcatccttcccctcttcttgctccaggctagtcagcatgcatgctcagctgaccctgaacctccttgaccagagccaccttcatcaatgacaatccacttgcgacacaaatagctgagaccagggagctagaaccatacctgctaccccactagttgcccttgacaatgaagggtctacagaggagatggtggtgctgctgtctctgcaatgatgctcattatctcctgcccctccccctcccataacaccattccctcatttcttttaatataaacagaaaatcagggcatgtaatgttagaatccaaatcagacgactgctcaggccacaatgcctgtggcagcccctcccctacagacaggcaccttattggtctgtgaagcctgagctaattccaaacttccaggtgccaggattttttttaccaggggaagtgagttgacatccaaaggctattgggggccatatatcctgttgtccagcttgctccctgctacctgctggggaatcaggcaacctggctgcaggctatggtgcaaagttgtctccctttctcacggagctgtaagaatggactccaactctgctataaggacttaattctcctcagagccttcgccatcatcgatctatggtgctgaggccggaactatacccagactccccactactgctgtctatctgttcatggcattaataacttttctaggaaacttctttttccaacagtcctgcttattgtctttcttaaacctgcccctgagacccttcagtttcccatttgccagaagttatctactacaccaatttaagcaccaacgattttacttaccaagtctcacgccgtcctaatgttcttgtgtggtgaaggctgctctgtcctgtttctgcttcaatgaatttattatgacaggggggaaaattgtgttttattaacttggtttttcacggtgactggtttaaaacaaaatacaaaggaagaaaacaaaactctcaggtttttcctggttgtgttaatcccagaccagcagaacagggtccaaggatccctgaagagaggagtggcagggacccagggggcagttaaggcggggcctccttcaaggagccgccctccctcaagatgaaggcagcagttgtgaggagcaaagctcctctggaatgcacaggcaggcaggtatgatcaaacatccctatgagctaacagtgtgaccctgggacttgtgaactcttacaaatggttagactctgaccctgaaaggccaagctctagaaagacagcagatgaatagaatttactacttagtaaggtagtgagacctctatacactcagatatagacacacacataacagtccatgagaaaacagtatcccacctcttactgcttaaaaaacaatccccagctactcagctccccgggtatgattttttctcctagccttgcctatctgctgaaccacaatgtacagtatagtactgttaccagagtgcattccctctctattctgacctcctgccccttcccttgataagtgtgtcactgtcacccatgcatggcaaagccacaagaactagatttctgttccatcatctactgtggtctcatcagtaggtttgacctgaaagctttggctaaggccaagtttgacttaaattcattcccattgccaaaggcaaggcccacacattgccgactgatgtaggatactaacaaaggagagccagctaggagaaccctaagtaacctcctaagaatgaagtgaagctacaatgaggcagaactcaccagaagccgagtgtgccagaggtcccttgtagtttcaggtcagctggcacagatcactgaagaccagtggcaattgtatctaccatgctccaccattactggcacgagaggagacatcacctggcatttgtgaccagtgctggagcattggttgtaaccaccacttgtggctctatttggtgcctttcgagtctgcaagcagaagaggatctctttcttgatctaacacaaagttagaaataaacgggatttaaagatcccttcaatctatattactctaaaatcctcggggatggaggggggggggggtgttggatgagggcagtgtcccatatgcttaaagggaaactaggattaacaccatcagtaacagcttggtatgacatggcctcctcaagctctgcatgtctctaacttgccagtgggacttaagagtgagaatgtgtgcatactgagcatgcctttgattcaggcaaaacccttaaacacttaaaataagtcttactaaaacataaaacagacctcacaaaaaagtttggactaatcaaatactgtagactacgattgacacatgcctttaaaatccaagacctttatttcaaactcctataagaagacacactcccattatacagtgccttgagaggtcaagtttgcccagagctgaagaaatcttgtttcaacccagtaccaggactacccttactcgagaaaaccctttcatctttttgtaaatataaacaaaggaatggcctttggagtctggtatggatattctatgaaatcaacttgacaacatttggaatgaactacaatccagaacctataaagatcttgtgaaaggaaaaaaaaaaaaaaaaaaaaaaaagcttaggtccaggtatagaggtatactcctttaattctggcacttaggagacagaggcatgcagatctctgagttcatggtcagtctacagagcaagttctaggacagctaagcagtttcaagaaaatattaagcaatcaataaaatcatttaaaacagaaagctgttgatataatagaacaagaggggcatattccagccccagcaagtagaaggacttggcagcttcggccatgtagctctgggattagagtcaggaatagaaggagttactggaacagttgatgttgatgttgtgttttgttcatgagccccagaagaccatctaggagccaattctaatgcaattgcatttgggtctctttattacaaacctgagtttgggcctatactcactgctagccctgatgcaacaggacagtttggtgaattagcctcaaaccctcatcggagcaagtttttatatgaaatgaaagcaagtgagggggtgttcagcctggcaagcatctagtagaatgactattgtaacccaacacgtgggttctctgaagcaagaccatgaacaattacaaacagtctgtacgtacatcggaaacaatcagacttatcttgattggctgcagctaggaagtagctagagagtaactcttgagtatagaccaaggacaaggcatggggtccttcctggtacttgggtacaacttgggctcagctgtgggccaagttctcaggctttttgttttgttttgttttctttctctctttctttcttttttctatgatggagtctggtcccaaaatggagtaggtttggcctttcactggttagtgggagcaaagaaattagtggtgattaagaagagaccagcatcactatggtgaaatattctgggcagtgttttctaagagtacaaagaagtcgtgttatgaagatagtcaaggctgtacctaatgctgttagctggacttggtaatgtataagagtctcccaagtggtattggtttgaaggcttaacggggtgatagagagcaggccagccttgacactgtgagaggccatggaaggtcactggtgaaggtgcagcctcagttgcagttgacatcccacgactgaaggggtcatgcaaagaagatgaggcttggcaccatgaagagagccaatgagaggctcttggtgaagtctagttgcagcagaaaatcccaatgtattggagatgccaatatcatgggatgaccactaagcacagaagcagcagtggaatagagttaaccagatctcagagtgctacagagggtagacctggagaagtgacctaagccctttggaggagcccagaagatcatgtgtgtataccagacattggaacaagaaactgtgaggttgaagttactttagaaccccttcctgactggttttggatcaagatgtagaactctcttggctccttcagcaaagtttgcctgcagactaccttattatatcccatcatgatgataatgaactaaacctctgaaactttaagtcagactcaattaaatatttacttttacgagttgccttggtcatagtttctcatcacagctttgaaaccctaattaagacagagtcttaactcacagtcatagggccagagacaagttgccttctcctctggcctctcagaccctgtaactacagactgacctacatgtaggccatcagtggcagcagctatattgtcagccactgtactgtcaacgaaagggagcaaagatctaacctttgcaggctccttgatgactagtgccccaaccaagtcaggtcaaagggttaacaatggttgactgaccctagactcctcaagtatgacgccacagtattcgagaagtgtgatctgagccttactaccaacagttccctcaaacccaagtcatgatggggaaaaggcagaggttgttccctgatagatggtgcactggctggcactttgtcaacttgacacaagctagagtcatctgagaagagggaacctcaactaagaaaatgcctctgtaacattgattaattaagcttgtagggcattttctgggttaatgattgatgtgtgtgtgtggggggggtgcccaactcatggtggatggctctattcatgattaggtggtccagggtgtataaaaaaacaaattgaggaatccagaaggagcaagccagtaatcagcatttctccagtctcctgcatcgacttacattcgcaatggtcttcaactctaagatgaaacagactgttcttcccaagttgattttgctcatgattctttatcacagaaatagagactaaaaacagtgctcaagcttatgaattgtttgctcttcatcaacctctaacagacgaagaagaagaagaagaagaagaagaagaagaagaagaagaaggaggaggaggaggaggaggaggaggaggaggaggaggaggaggaagaggaggaggaggnnnnnnnnnnnnnnnnnnnnnnnnnnnnnnnnnnnnnnnnnnnnnnnnnnnnnnnnnnnnnnnnnnnnnnnnnnnnnnnnnnnnnnnnnnnnnnnnnnnnnnnnnnnnnnnnnnnnnnnnnnnnnnnnnnnnnnnnnnnnnnnnnnnnnnnnnnnnnnnnnnnnnnnnnnnnnnnnnnnnnnnnnnnnnnnnnnnnnnnnnnnnnnnnnnnnnnnnnnnnnnnnnnnnnnnnnnnnnnnnnnnnnnnnnnnnnnnnnnnnnnnnnnnnnnnnnnnnnnnnnnnnnnnnnnnnnnnnnnnnnnnnnnnnnnnnnnnnnnnnnnnnnnnnnnnnnnnnnnnnnnnnnnnnnnnnnnnnnnnnnnnnnnnnnnnnnnnnnnnnnnnnnnnnnnnnnnnnnnnnnnnnnnnnnnnnnnnnnnnnnnnnnnnnnnnnnnnnnnnnnnnnnnnnnnnnnnnnngaggaggagaagaagaagaagaagaagaagaagaagaagaagaagaagaagaagaagaagaagaagaagaagaagaagaagaagaagaagagtcacctacacaaactctaattatgtctttggagtcagtatatatatttagaaaactattggcaggccaggtggtggtaccccatgccttaaatcccagcacctgcctgccaatagtttcttatgaatcatttatgtcttcttccaggggcactgcttctaagcttcctcaggaaagccctgagcatgttacccatcacaattttagggagatattctcacctggccctacttgaaagtcttccttacacctttgaggttgtgtcttttctttataactttaagattgtgactcaaacaccagagatcttatgagacacttttggaatatctaccccaggtccttacttaggagcaagaaaatcagaatgaagtagactttaaaaggtaaacaagatagatttggcaaaagatcatattacaacccccttcctactgtatgctcaggtgagtatgtggcatataagattgggggctgcctatggtatgatcctcaaggaaaataatgtagcaaaaaagttggattgcctggagttatctctgccctacatgggggcttatgctgatggacgtagaatgatatggaagatggtaaaagactgaagtattaagatctctccttctttcttagaaaagtcagctcatgtggtgtcctatgatcaaggaacaaaagaacggctagacacataaataaattctgcaaagatataaaatatattctgttatgtcagacattgaataataactgcagcagctttagcctaaagattcttcttgtgcctaataacaatgaacactctgaccattcaaagttgataattcaccgcttgggacgtggcaacctgcccaggctgtctaggagattgttttcctgtctagtgcccttgaaaacacaaggttcttaaaagttgggttgtggggttgatgaggaaaaacaattgtaaaaaaataattctgtcctgtcactgtttatcaatatcgactaaacgtatgcccaagaagaagttaaaacacacgtccggagacagaaatgatgtgatctatattttggaataacatgaatctatctctgcccactgagttctgtctgtataaagaagtgtgctgactgccagtcaggctgcaagatcctcccatcccctcctccccccccccccctgcccgactcactcttccctcaccgactctttatcctcaccaaatttcctggccattcccggggctatcctccagcagaggccatccctggtctatcagcctccaaactgtccttcatggctatagtgctctaggctaattagttgagaatttgggaatagatgactcctttgctaactttatggaccagggggttggaaaatggaaaggagggaagacttcagttctcacaggcctgactatagtctgtggtatgatcttgtttagatattagataactccttgtctaaggggccccacccagcagcagctcacctcaccaaatatccctcagttacaataattattattattggagacttcagagcatgaacgtcagcatatgctaacagaatttgaagagaagaatgaaaatgtatgataaagaggaagggattgtgagaaacagcctcttctagcaacgatggctagcctgccaatggccaggattccggaaagctcaccaatcctgaaatttgcttctcaggaacagattatgatgctgagctccaacaacctgttgacacagaaactaagtgaacttctcacccggtgtgcctgctcactcaggttggacttctgtgcactttagttaggttccatgtctctttatgtgacagttgggataatcttctccaatgattctccccatgttgctgcttgtatggcggttttcatgtttaaacatttaaaactacctgttttccacacacatcttttatttctttgcttgagtggtttgagacagggctcactaggtagtccagggtgccctcaggctcactgtggaacctaggctggctttgaattccttctgtagttccctgagagataggattacaggtgtgtaacctgcccatctggtattgattcactgtacttgatgaagtactattaagttttgattcctgcatgtgggtaccattccttcactgttctttaggatttcagacatatttgtttgtgcactttgacatatgtgctggctgattttgtgtgtcaacttgacccacagaaaggagcctcccttgaggaaatgcctccatgatatccagctgtaaggcattttctcaattagtgatcaacggtgagaaggtccattgtgggtggtgccatccctgggctggtggtcctgggttctataagagagcaggctgagcaagccaggggaagcaaggcagcaagaaacatccctccatggcctctgcagcagctcctgcttcctgacctgcttgagttcctttggtgtgctgacttcctttggtgatgaacagcagtgtggacgtgtaaattgaatgaatctttcctctccaacttgcttcttggtcacgatgtttgtgtaggaatagaaactctgattgagacaacacacgtgttctacttattgtgcacagaagtgccacagttttcatcaactcctcatgcaattttatgcaatatgtctcctattgtttggctttcctcttttggtggctcagatggcaggccctgagtgtggcactctgaagggttgagctggagaataactcagaacttagtctctatggccatcccccggcctccctactcttgagattccattctggtccatttccttaaaaatgtagatagggccatttggtgaacttccccgtctacccaagaatgtgcaactatgcttgaaatctcctgaccaagggaaaggacatggctgaaaaacaaagaagcagtctaagaacccaggggaatttcacnnnnnnnnnnnnnnnnnnnnatgcaattttatgcaatatgtctcctattgtttggctttcctcttttggtggctcagatggcaggccctgagtgtggcactctgaagggttgagctggagaataactcagaacttagtctctatggccatcccccggcctccctactcttgagattccattctggtccatttccttaaaaatgtagatagggccatttggtgaacttccccgtctacccaagaatgtgcaactatcttgaaatctcctgaccaagggaaaggacatggctgaaaaacaaagaagcagtctaagaacccaggggaatttcacccctggatgttttgtgtgctcctagctctttcctttcttctaaagagcacttatccaatgccttcccgagccctcacttttcccttacacacacacacacacacacgcgcgcacacacacacacacactcagacacacacacactcagacacacacacactcagacacacacactcagacaaagtgtgtaggtgtcaacctgttggctctttctctgaatttcattttttactggctctggatacattaataattgtgctatgtgttttctttgtcaatctgcctttttttttttttttttggagacagggtttctctgtgtagccctacttgttttggaacttgctctatagaccaggctggcttctaactcgcagaggcctacctctgcctcccaagtgctaggattaaaggtgctgcttgcttgtcagtctgccttttgtgatagggtgtcagcctcttatgctacattgggagcacagggtcacttttatctctgtcccatatttgaacacatcagaatttttttttctgggctctgctcgagtggcagatattccattctacctttctctaactattctgtctagaagaactagcttcctcctggtttaaagtttaggtccatggttcacactggcagctcagagttccaaacaatgtaacctagagagcgggaacatgcagtagagccctaagcaggacgttgtagcttatattccagaggctagacaggctgaggtctgtttagtctgtctcaggacagacaggaaaagcctcgctccttcatcctgtggcttcccgagactcacagcccagacaagctgcagcttttgctacttggcaggaacatgagtgtggtttttagtacattttttattaaaatgttaaggcgccttcaggtgtttttttctttctttctttctttctttctttctttctttctttctttcttttttgattcattcaaaactttcttgagagcagctaaggatacaaaggttaaaacatggtcaaagaaatgaggcatatgcacaagcggtagagaggtaaagttttctgcatcacaagagtaaaagaaaagtgctttaggaaaaacaagtttgcttccagcctgcaaggggagtggacggccaatcaggaaaggggactgagatgtctggattgttgatggtactgagtttgtttctccttctcctttttccccatctttgggcttaatttaccagtagtgcccaggaatgttcaatgcgctttttctatacttgcttgcatctttgccttaatgtcttctacagaactaggtccttttggtgttttaggagtcttttcctgttttttgaaggactcttgaccctttgatcttggtgttgacgttttttttttctttgtcaatctgccttttttttttctttttttttttttttttttgagacagggtttctctgtgtagccctacctgttctggaactcactctatagaccaggctggcttctaactcgcagagatctgcttacctctgcctcccaagtgctaggattaaaggtgctgcttgcttttccattttagtttgattttttgcgaatttttggctggggtatctcatacagagtttttcactgggacctttttttcagtttcctcttcatcaaaatcctcatcttcttcatcctcctcctcctcatcatcctcttcatcacgttttacttttttctgtggatccttgttaccacctccaggagcagatcactttccagacatgcctaagagtttttcgtcctccccttcttcatcttcagactctgcatcttcctctacagctattaggtactgtcccctaatgtgcacaggccctgaaccactcttcaaccataagaccacaggtagtgtaatttcgaagcccccaagggaaactgttggttgtacagacattttcaaagtttccagtgtgactttaattggactgccttcatcgttcattgcttctgcctctgtgatgtgtaattcatcttttgcccctgctcctaaactgaccgttcttaatgacaactggtgctcattgtcatcattatccactttaaagtgatagtctttgtcagcctttagttcacagccgaaaaggtagttctgaggcctaagaggactcatgtccatcgagtcttccatgaggtggaggcacgcactttggtgtgggagaagcaggacgaaaaacaactgcctgctgttccacagaatagacacgcaggacagaatcatgccaaggcagttgtttcattttgaagtgggggtttaagagtgggtgggaatcttgatcagaactcacaatctcacttcttacaaggcgatgtcctttgacctggccctgtactaggctcaaaccacatagagtgctgtctatctccccacgagaactttcccaagtacaacaggttaggccgaagagaggaatggctgcttaccataagaggcatatgtgttttacttagatggctgctgcctttaggactaagaaggacttcccagtatttaaagccctcccactgggaattcaaattcaaaaaacatgtcaccaggaccagggccaactggttgacctggacatgactcctgtgtgatgtttgggcctaaagtgtaaagtgctgagctgggtaaatgctgccccagacactctgtgtgatacaggactcttgctggaataagcactctaacaccaatgagaggagatgtcactggtggactgaagctgaagccaggacagctcctgaagggtcttggtaccaggtctagtttgtatttgcattttatattctaacacccaaggtgtggcaggcaagctagcaagatttcacagaagcctacagggcagtgagcaggttgttaagggcaatggcctatcctttcagctgttgctcccagtctttctgttccaggtagcaagtgaagccatgcttggcaaatggttggtaaaaacaatgtattgagtaagtcactaaatcagtcagtaaatcagtacctaatagttggtcttttctgccttattctacctcatctggaggtgaaacagagagaaacacctacactctggtctctgccaaaggccattcaggaggaatgacaaatggctttagaacaaatggcccactggttagcatagtcacgatgggtgttacacagcccctaggaccatgtgtcttgagggcttcatgctgttgtggagttctgctcagcttgttgccttcacatccttcttaatctaagagctgtgtgaaaactctaacagcgcttctagctccttgctgggcagtatctctggcattcacaataacaatgcttgatctcttccaggcattgctgctggggcagattaatgattcaatcaccaccctaggaaaggatttagaaatacagatcatcagcaatgatcaccacccttagaaagcatttggaaaaagaaaattgttagcgaagccaggttacagtgttttttgtttgtttgtttgggtgtttttggtttttttgtttttttgtttttggttttgttttttgctactggctctgatgtagaaaatcttagggaacaatttgaaattcagaaaggcacagtcttaacagttaagctagggaccttttaaggtcagggaacaagaacaatggcagcactggctttttctcactgaagctggattcatgatgagtgatttctcatatccatttttccccacagcttcttgatgtggtttaataaaaattaccaatgagtagatatttctgaggatttgaaatagatatgactggcttttatataaaactttagatctgtgattcttttaagattcttataagattactttttaaagataaattataattaatcctttgtttgtaaccacaaattgttacctgtcagtaggagaaactggctgagaaagctatcttgcctgtttatattttattaatctatgacaagctgtgagttacaagtgtccatattattatgaatactttacctgcactatgtaatgttatttttgtaaaggtattgaggaacaaattgctttttcataatcactcactagaagaaaactagaacataatcaccatgtgattttatactgcttgaaagattttgctgagatacataagctatggtagaaaaaaaaataaaattgttggaattttgttccatttatctgttaaggcctaggtatcaggtgcctggctagcctaccagtataaggaaactttctcatatgtttctgctgtttctagaaaaccttcttttttttttaaatattttttattattacgtattttcctcaattacatttagaatgctatcccaaaagtcccccatcccccccccccacttccctacccacccactcccattttttggccctggcattcccctgtactggggcacataaagtttgcaagtccaaagggcctctctttccagtgatggccgactaggccatcttttgatacatatgcagctagagtcaagagctccggggtctagaaaactttctaatgtcaagttgattacgtattgttatgttttgtgctcttggaaaccaatcatgatagaagtcaatagaactgctttatatagttacccacaataagcttagacctgaacccatcacctagaagcactgcctgcacctgtatgcaagcttttatagtataaactgcccctggggtggaccccaacataagagagacaccttcaccaatagaagaaactatttggaataagacttccattttgagtcgtggttaacctctctgggaactgacatcctacttggcagaaagagacatgcacataggtgacggataccttgcttggcaagttaaggcatgaatgttagacaaatcccatctggtagacaagttaagacatgaatatattagacaaggtaagtcccctgccacagctgaatgggagcaggataaggatatatatacatatacatatacatatacatatacatatacatatacatatacatatacatatacatatacatatacatatacatatatatacatacatacatacatacatacatacatacatatatatatatatatatatatatatatataatgttcctaaggaaattcttttttttttggggggggggtgtttcaagacagggcttctctgtatagccctggctgtcctggaactcactttgtagaccaggctgtcctcaaactcagaaatccacctgcctctgtctcccgagtgctggaattaaaggcgtgtgcgaccacgcccggctcctaaggaaattcttatccctaaatcctgactggtgaaataacctggaacagatgtttgcagatctcaggctttaaaagccctgcaggaccttaacccagggtcacagtttagttcctgaatctggacaatggccctggttgatcaattctggcacatgtactcaataaactactcctgtctggctgaaattggtgtttgtatggtttgtgacgcgattcctggaccccaacacgtcaaatctgtatgtatgtatatgtgtaaactttgtgtgggagtgtattggaactttgttccatccatcaaatctatatgcgtgtatatattgtaaaacttgtgtgcgtatgttggagattgttccatccaccaactctgtgtgtgtgtgtgtgtgtgtgtgtgtgtgtgtgtgtgcgtgcgtgcatgtgtgaaatgcttcaagcctggttgttggaactttcttctctccacccaccaggtatatgtgtatatgcatatatgtgcatctatgtatatcatgcttatatgtgcatcatgtgtatatatgtatatacgtgtatgtgtgaaatgcttgtagcctgctttgctccatccatttaatgtgttaatatgtatatgtctgtccatccagctgtctgtctgtatgtatatacatatgtatatctgtatttgtatgtatgaagttgctagagcattgaaagtgtgtgtcatcccatgtcaagatatggatcaaaagcctatgtcttctagcctcaagatctggatcacaggtgtgccctccatttctggattgtagatcattccagacattggcaagttgacaactgggagtagccaccacagtccaccggtgacatctcatctcttgtactctcgttggtgtcagaacgcttattccagaaagattttcatatcattgtcttagtcagggtttctattgctgtgataaaacacatggccaaaggcaacttggggatgaaagctgttttatcttatactacccagtaactgttcatcactgagggaagtcagggcaggaactgagcaaacatcatggagaagtgttgcttcctggcttgttcatcctgttttctttttgttattttgtcttttttttttctttttaagagctgaggactgaacccagggccttgcgcttgcctagctcttccacagagctaaatccccaaccccagcctgctttcttatatcatctacaatcacctacctaggggtagcaccacccacaatgggctaggctctctcacatcaatcattaagaaaatgccccacaggcttgccctcaggccaatatggtgggtgcattttctcagttgagggtccttcttcccatataattctagtttacctcaagttgatgtaagaactaaataggagactttatttaactaaccattaggcaggctctcaccatgtaacctgagtggtttcaaactcacaaagatccacctatctctgccttctgagtgaggagattaaaggtgtgccacaatacccagctactttattatataagtgtgtgtgtgcatgtgtgtatgtatatgtgtgtgcatgtgtgtatttgtgtgtgtgcatgtgtgcgcgtgtgtatgtgtgcaagagagagagagagagagagagagggagaaagagagagagagagagagagagagagcannnnnnnnnnnnnnnnnnnncctggtgtgagtactaggaattgaactctggtcctccagatgagcagcaagtgctcttaattgcagacccatttctcctgccccatactcagagacctgttttctccatgccattagtggtggggaagtgactatctctctggagaactaaaagcaaactagtcctgacatgtctggggaaagaatccttcctgccccccccccccaaccccttttgcccctccccacagcctgctccagcaggaggtcgtacagaggtgaaggcccgtgagaagaacctgacagaagagctgcacaacagaaggatcctcggccccagaaacagagcagccaccataccagccctggggcaccaacttttacacagaacccaagcctgagcactccctgtgtagagcctttgagactgaggctgcagcaacctgtcccgcatcctaactagtgtacagccatctgtctgctacctaaagcacagccctctgaaccctgggaactcatggcatcacttcgacccagattccagaaagtgacaaggacagaaagaacttgactttctctaggtcgcgaagagcctccatattccttcaggtcagcagtgtggtttataaaattgcctccttttcttttctcttcttttcttttcttttttcttttctttttttcagcaagaaaagccagttaattaaaagctttagcaaaatttcttcttttttcttttttttaatttttttcctcatttacatttccaatgctatcccaaaagtcccccataccctcccccccactcccctacccacccactcccactttttggccctggcgttcccctgtactggggcatataaagtttgcaagtccaatgggcctctctttccagtgatggccgagtaggccatcttttgatacatatgcagctagagtcaagagctccggggtactggttagttcataatgttgttccacctatagggctgcagatccctttagctccttgggtgttttctctagctaggcaaatggttggacctggagggcattatcctgagtgaggtaacccaatcacaaaagaactcaaatgatatgtattcactgataagtggatattagcccagaaacttagaatacccaagatataagttacaatttgcaaaacacatgaaactgaagaacaaagatcaaagtgtggacactttgcctcttcttagaattgggaacaaaacacccatggaaggagttacagagacaaagtttggagctgagacaaannnnnnnnnnnnnnnnnnnnttttggccctggcgttcccctgtactggggcatataaagtttgcaagtccaatgggcctctctttccagtgatggccgagtaggccatcttttgatacatatgcagctagagtcaagagctccggggtactggttagttcataatgttgttccacctatagggctgcagatccctttagctccttgggtgttttctctagctaggcaaatggttggacctggagggcattatcctgagtgaggtaacccaatcacaaaagaactcaaatgatatgtattcactgataagtggatattagcccagaaacttagaatacccaagatataagttacaatttgcaaaacacatgaaactgaagaacaaagatcaaagtgtggacactttgcctcttcttagaattgggaacaaaacacccatggaaggagttacagagacaaagtttggagctgagacaaaaggatggaccatctagagactgccatatccagggatccatcccataatcagcttccaaacgctgacaccattgcatacactagcaagattgtgctgataggaccctgatatagcagtctctagtgagactacgccggtgccttcttttctaaagcacacaaagtggctgtgcatttcccaggggccatgttcccactgtggggagacaatgcacaccagctgtaaatattcttaagggtggaactgtttccacccacagcaccattttctcaggaaacattgttgctgaatgctggccatgtcctctctgctgaataaagcttttaactcctcactagacacagagttcaactgctcggatccagagagacagttcaatgtttgagtaacacaggcatgtaaggtgatcaatcgcagactgttttcttggtgcacacatctctgaaaggactaatgggtctaagaacgagctgttaggaaggaagaaggtggccaaatcaggctcttgatatcctgactgtgtccagggtgggaggacacaggggaatgcaggggcctaacccttggagatgatatcatgatgtccagaatctctatgtagcgtgagaggggctctaaactgaattcggatttggtagttccagaatgtctgatattttctcactgagcctaaattcttggagccgacacactctccttagggaaacactttcaggatacgggatgctgacagcccaagggcaggatgctcactttggtcactgtatcaggtggggcttcactgtaaagtcatagaattttctctgggaatgaaggagcctagggagatgtttgttttcaggtatctcaggtttaagcattttagtacaaatttcagtgacctcacctgcatcagctgaggtgatacagtagggttctccccgtgatttacctctgtattgctgaatgggaattcttcataaggattcccacccagcccagcactcattcactcatctgaatcagtagagatgggagatggttatttcttctgcagttttaactcagaagcgattttgtttaccatcttgagacagagtttcacatcatactccaggctggcattgacctcatggcaattcttctgcctcagctttccgatcctctactatcctaatactccctttcagctactccttgggttgtgtgctctcaggctggcttctacatctctgacattatccttcgccacaagatgctccaagctcatctttgctgcctaaatcccggggctgccgctttaagaatttgatgtggagacagagggtggacataagtcttgtgctatgagttctggccatcacctttcaatatgaggtgacaggtacccaaacattatccaatacatatatgcatgtgttccacaaagcaagttgcacaccaatgaacaactgtatgtgtattccccaagaaagtcagaccacggcagttcctccagaggctcattgtcacatttattagtagtagctgcaactggactggtgcttccatggggactgttgggataagttcaaggggacagcaacaggaggggacaccagtgatggtcagctagggtcttaagatgggatacagagcacagtgacgggtcaccatggtgctgtcacagcacaaggagctaatggatgctctcatttccttcctggatattccctgagcctcagtccatggtgggcagtacctcccacagacttggagcttttggactctggctacttcctggaggtgaagtcacactgaccacatctgagacaccctcctacccccaatcatggccagtcagttgtccccagtaagtctcaggactgaccacgtccaactgcctgacacagctgacaggtgacagctggaggcaatgtctccattcttgcctgtctgcctgtgacctgagaaagagatagggaaaagaaacttccactttcccgagaaagctggaagagagagagggcagattgtttctgggtaggaacagcactccgaggaaactgagacttctcagttcttcagctgagacacctcatacagatatgcagccagcattttggttccttctatgtagttgagcctaagagagagaagcaagcaaactagcaaacaaacaacccagctatcagctgcgggctgacgagtcagtatccatgaaggtggtgactcctcctcctgatttctctctagggagcacccctgttccagctagcagtctggtctgactttataattcagcctgatggttctcaagaagaggttcagtgtgacacctcctctccccaccccctcactacaaacaaccagtccaggctctggtctagggcttggtttcacccagtatcctgggagcaaatggccattatttctgaagatatgaaccccttttccaaactgctactaccgaggcctttcgtctccctctcatcagttcttactagcaaacccccatggaggagtgatcccagacccaccacctgtgtgaggatgcaacccaacccggggaccccatctcacctgttgagcttctcattctgcgagtgggcaccgtcatctgctgaccccactggcaatagcatgacatttttgcctgtggcctcttgaaaggtcaaggtcacaggaatactgccaccttctctggtcaagtcaggctcaacaccaaacactggggaaacaaagagaaatgatgagttttgggccctggatgccagaaagccaccacttagcaacaatgagtccagaccctgggctctggaatgtactcttacagacctaggccctggtctcaccccacactcagccctgcttggagcactggcagatactgcagacgttacatgaacaacatgctacaacagagtcctcagacactctcagggccccggtacccacctccaaagggtagctaacctgtcttcagggctcttctccccgcctggtaatgaggatggttgaagtcagacacccagggcttcccgccgtggcccatgtacaccttgaacttgttggggctctgcagttcagcaaatttttttgacaagtagcttgaaacctaaaccgtaagcagaagagatgcacggaggttcagatctggcattggactcaatgggaggaatctacagggtgtccggaggttgacaatgagttgggcatactgggcctacacagcatctaacagtctagacacccttgacgcagacatatcaaattatggcgatacttaaagactgagttaaaaccatgctgtctgacctgacttactcaacagacaggatatctgtacctgaaaatgcctgtgttgacactgggatgtgcgctctcccaggcaagctgctcactagatttagggtcacctaggaaacatacttctggtctaacttctgggtaagtttaactgaggagtgaaggcacagcctgaatgtggacagcctctctggagacgaggtatcagggtactctttccagaagcctccgaggtcccgcggtgggattttcagctaacatgtagccacatatgagcatttgctttacatctttggggtgaggtcaggtcgtatttcccatgtcttggtagtctgagccttaatgcttgctcatgtggcctgtctctgacaagcttctgtactgtttattacagcaaatgctgaggggaagaagcaggaggctctgcccaggtggttgttcttactgttttaagtttaacaccacagcagcatacagctgccacgtgtaccccacaacccttacccgactcacgccccgcatcccccacatacttgctcgctaacaacttccggtatcatgtctggcacgagcctgatggagaacttgccgaccacctttctggggatcacagtcttggcccctgaaccggagaaggccccttcgatcccatgcagggagagggacgggtatcgccatctgtgcatcaggatgtctttctgcggaagcccaggaggagacgtatgaatgaggacatggggacccccacccagtcgggctggacaaagcccatccagtgaatgttcggggactcctgtcactgtgcagccttagcaacctcaagaggtgacagtgactatgaggggtggcaggctgtgagcctccagcccccaacaggctacggtgtctctcttcctctgctcgcacttgtcagactgagcagcaattctcacaggactctaagcaggtctgacttctccccttcagcctttgctcagctgatggagcaactgtttatagttatttattcccctgactccgagaaagttgagaagaaactcaagagcccagcctggcccgctcctctcatcccctgtctctggggcctacaagaggctggtgcaggactctattaatgttggctacacagaggtgatggactgatatccactctcctgaggctggaaataaaccaaaataaagttttcctcctaataattaagtcaggacaaatagcttctgcctctgcaccccgcttaatctccgggccttgtgggagcacgtggccggcaaacccaaaccaatcaaataccacccgtggctggagaggggctgctcgctctacctagctcccccggctccgctctcaactggaccactccctgcttttgatgattctcgagcaaaggctcccctaggatgaacctctgacactggctatctttcagacactgcctgacctcgaagccccaatggcctgcaacagggtaaggggcggggcaggcggcaccttgcagctgtgcagaagggtctcagcccccacgtccttggcgaactcttccatatcgaagtcaatgtggtcgtagagcgcatgctcctcatccgtcacaggcgccacggcatcgttgatgcccgggatgaggatcttccccttcttgtctaccaggcagcctgagggaagaggcagagggcgagatgctctatcagacagcctaagggaagaggcagagggcgggatgctctatcagacagcctgagaaagaggcagagggcgggatgctctatcagacagcccgagggaagaggcagagggcgggatgctctatcagacagcctgagggaagtggcagagggcaggacgctcggctcaggcagtgcaataagcagtgttccaagttgtcctgactctaggaactcaggcacctaggcacaccccccagccatgtgaacagcaggaggcgaggggcacttgggtccccgatgctagggagtcggttaagtagccccaagcaggtgagcaggaccactactcactcattttcagagagactgaggagcaggtggagtgcttaagttagctcccagctgtataccaaggcatgaacctgaaaacccacactagccagactgcatttctttatggtacacattgtgtaagaaacaaggcccgctaaagctgacagggaagctatgagtgggacagtctctgactacagatgcaatgtcacttcacctgtgggagccctcatcctaggatgggggtgagaagggaagttacaaactacactgggggggcgaggggggtttggggggtgagagagttccccttagctttatgctagagggatgtaggaagaagttgtggctcttactctacagggcctgacaagcagggggaccaagttatggcctgttgaaacagaccaaaggaaatgtcctctgagatatgtaaaataccatctccagaaaaaagaaagcatggggggcagggcagggtggggtggggggggtggggaggtcctaagggtcaggctgagcaggacctaggggcatcctgctggatactggagggagggcagctctagacatgatgaggaggcatggaatagatgaaggagggacaggaagtgggcagaagcagaaatggaacacaggatcctttaaatagaaaatgcccagaggaagggaagttaattagaaacttggctgagtaagcccatgaaggatgctggaacatactaggcacgtgcacagatagtttagaaaaagtaccctgcccacttccctaagtgagaaagtgctgaccccaagagcaacgatcctgagctcacccatcagtgaaatgagatccgtcatggcctcgtgcactgagcctccatataccccagaatggaggtctttgtcactgcattccacctgggcagagacaaaggtcactttatttggaagtgggagcttattttaattatatgacattgcactgaataaaggacacttgtaagactgacagttctccagtccaaatctgctccctcaagcattgaagcaggacatttcccaattaaaacatccagacaccagatagactcctgatgtgcagaccacatgcacactgggaatgctggctgcaagtgcacaggggatgctggctgcacgtgcatggggaatgctggctgcaggtgcactggggatgctggctgcaagtgcaaggggaatgctggctgcaggtgcactggggatgctggctgcaagtgcaaggggaatgctggctgcaggtgcactggggatgctggctgcaagtgcaaggggaatgctggctgcaggtgcatggggatgctggctgcaggtgcatggggatgctggctgcaggtgcactggggatgctggctgcaagtgcaaggggaatgctggctgcaggtgcactggggatgctggctgcaagtgcaaggggaatgctggctgcaggtgcactggggatgctggctgcaggtgcatggggatgctggctgcaggtgcactggggatgctggctgcaggtgcactggggatgctggctgcaagtgcaaggggaatgctggctgcaggtgcatggggaatgctggctgcaggtgcatggggaatgctggctgcaggtgcactggggatgctggctgcaggtgcatggggaatgctggctgcaggtgcactggggatgctggctgcaagtgcaaggggaatgaatgctggctgcaggtgcatggggaatgctggatgcaggtgcatggggaatgctggctgcaggtgcactggggatgctggctgcaggtgcatgggaaatgctggctgcaggtgcactggggatgctggctgcaggtgcatgggaaatgctggctgcaggtgcactggggatgctggctgcaggtgcatggggaatgctggctacaggtgcactggggatgctggctgcaggtgcatggggaatgctggctgcaagtgcactgggaatgctgaccccagaaagtatggtgcagtgtagcctctctaacactgaggaagggcagaatcctgtctggcatagccatatccactgggaacaaaagtcatgaactcagcactgctgtttgacacagttccagcaaagctaaaccaaatgctgcactctttgtcattctgtcccttactttgaggttttgatctctgtgtgttgcattcttggggacttcctgcattatgattcacgttatatcggagtctttttaggagactgccttggagatcatgataaggaatttctaaatgagaccacaactcggggaatcttctcggggtatcgcccctaggcaaactcaaacagtctaattggagcagggtcagcagagataactgacaaactctgactacaagagaattagtaaatgattaaggcttccttttacagaatgcttcagctctctgaaaatgtagttaaagatagagtcatagaggatatacccctgggagaacagagctcagtaaataagatagactaactacaataaccttttcctactttacagcatagatatatacaaataaaaggagttaggtgttagtattataattaggtgtgcagatattttctttttgcctggagtgctttaaaactgcaaatactgtcagccccaaagcaagctgtcatataatagatgtgtttgctttgacagaggcattcttcagactctttgaattgggagggagttttagggctaataataaaaataaaatctgctctatttctactttctacctgtgactgaacttgtaaccctggacatgtaatgaaaaaaaatcaaatacacgtgcagatagaaaatgctataaactgtacttcttggatagtcactagtctgcctttgttgtgtgaaacctgtgtaaataaagaggccacctgattgctagtcagtcacagctgcaagattccctgtccacctcacctgactcacccctccctccctgactcctctcctttcaggccaccctctcaatggctggggctgaccccggcatctgtcacctcacagagaccctgcacaagcttgctcggaggacgacaccaagcctggagcatgatgtcatcaacccaaggatcagcttcagacccatctgagaactgactagccttatagccaggcaagacaggtaatcagtgtgtgctcgattggaccagcagctataacagggaatgccatgtgcctccctcacagtacagcactggcatggctctgccctatcaggtgatgaagacccctggcaggatcatcccaggggaaaatatctctaacagcaggcggcagatccatcccacactccttgctcatctgagggtctccattctctctaaataactcagcaatgggattaggtcttatacccactgaagtgtgaacatttttaacttttacaggaaggttcttaaggcttattcgttcatctcagaaaaacgagcattcactgtcatctcatctgctctgatacaatatcaatattattaagataatactgtcttaatttaaaactgccatgagacttgacttctgatttcagaagtccatgcctggggtattaggatggattaaggaacacaagaaggagcccggaaagctctgagcttcatgcatggttagcttcttggtatttgccccggtcagggtatggaagaacaaagaggcctaggggttagagagacaaggtgaagctcgggggactcaggtcgtacctcgatgaagaagtaacagatgcctctgaggccgtacgtgatacacggcttattcttccccagccagtaattgtctgaaatgcacacatagtccacatctttgaagaacttgtctttctgggcaaaaatgagctcatccaggccttcggagccagactcctccatgccttccaggcagaaccgcaggttgactgggatctcctgtgacagagcgtggtaagacatggtttccttacttttctcacagaagtgacacatggcagactgttttgaaatttagtttcaaatatgagatcttctcccactggctcctgggagtccagggtcagaaggaaaagccctacatgcctaggcaagtcgcttacagagtgagccaatgagtgtaggggaagccatgagtcagggaaaagggcaatgaatcttagcctggggagcactgacggctctcccagacgacaggggttcccattccctgctcaaacatggctgctcacggctgtctgtaactcaacctcagacctccacgtgcatgcataaccctgtgcaaatgaaagtgcacacatggaacacttgcaaacacacacacacacacacacacacacacacacacacacacacacaatagaggaatcagaagagaatttttttcttgaataaccactgagacttcactgttgctaaggctaaactgagacctttcctgtactaggaaggccttccacagcatccctctgctcacagaagccaagctgtcctgagatgcccggacctcatcacagtgctggaatctgggtcgagttctctggaaaatgtttcaagagttcttctagctccgtaggatgaagcaggccaccagctgacggccacacacgggccagatccacgggttcaaagacactctgcctagctgtccccagctcacagctgccctgagagcaatgttcactggacagacttcttctcctctatcccaagtgagttcttccccggaacctccagacacagagcaactacagatgcaactgctcagggcgctgccctgtgcacccttccctccacagcctccctaccctgcgtggggccctgcagcaggtgaggctgcctggtttctgtgcccagcttttgggtcagctgtcagacaggccaagtggttttttgttgttgttgttttgttttttgtttttgtttttaaaaaaacaaaacaaacaaacaaaaaaacctgttctttcctgtgcaaatggtctcccagacaaagaaaacctaagcacatctaatgatccagactttgacaaaaataattattcttattttaccgtgccatgaaataaaatccatctgcaaaacctgcccagactgcatgatcacaatcaggttggagataataaaaaaccctaggtgggaagcaggactagggggtatttaaggactaggttcctagaaatgcctcctttctcctattttcaatattttaccatgtttgaaccttgaggaaagaaactcaaaacaatctagtatttattttttttaggagaatataaaccacacagagaaaagaatttgcctaatatcataaagtctgcaacttcctggcaaaagaccatactcacaggcacagcagtcaaaggctggaaatctgttttagtcagggttggtggcccaggcctgtaataccagcacttgaaggctgagcaggaagactgtcaagagttcaaggtcagcctgcattatataacaagactgtatccaacaaacacacctacacttcacatttgtgagctgggtgtggtggtacacacctataatctcagcaatggggagatagaggcagatggatctccgtgaattaccgagggatgcagagtgagacactatctcaaaatcaaccagccaacaaacaataataacaaaaataccaacaaaataaaataaacaacaaaaagctccccaaacatctataataaaataaaataaaataaaatccacatttggtgatagcgatacagctcaatggcagagcagtttcccagcatgcatgaggacctgggtttgatctcagcgcagaaagaaaggagaaaaaccaagaccacattctaagtgttgacaagagccttgctgagtgtcgatagcttgacctttgagcatctctaagacaattaccttgacctttgagcatctgtaagacaattaactgattaatgatttctagagctggaaacagctggaatcttccatctgtgtccccggtgctgactgaggtgggggcttgctttctcctccctggtgacctttacactctactcacatgatctgaagggcggacagattctgatatggggatgtacctgaccagtcttctgataggcttccagggcattcatccacccggccactggccccttatcgtccgtggagcctctcccatacagcttgcctggaacaacaatcagcagattcagttagagacaacaaatcgaaagaccttgtttcaagtagtcataatttcaagtagtgataatgcctaggcacagacacacacagctgtcctgagcaatggagctttaactttaaaagcccaaatctccatccaaccctacactaaaattcagattcttgaaatccaaaaagcagtcatgaggatccctcctgttatctatccctttcatagcaactggtctaggaccagtgtttacagagaatcagggctgagattcaccttgcaatttcaggaagtacatttcacaggatagctcctacctagctacacctttaagacctatattccctccccagctgtcagcaagcatgtggaagcacatgccatcactacagaagcaccacaaactatactcccatcctgattttgacagttaatctgaatctgctgggagaatggcattaggctcaaagaagcacggtagaggctcatctgggatcacagcagaggctgggaagagactagggatggccccaggcaggaaccggacaaccctgtttctggtgtaggtggtgggaagatggtgccactcaaggatacgtgagagagggctcgaaggagaaacaggaagattcccagtccagacagcttgagtcaggtggccataaactaccatgcagacgtgtgggtgtgagactcaggaggaatccagtgcccgtggaatcaacagcaataggacatacccagttctgtgaggaggcccagcatatgggatgaggcttcacaaagaatgtgtcaaacaaaaataactttccatacttcatagccatgtccacacagcgttaggacacgtgtaaagacagactccacacccagttaggggataggagctcagacctgaggggcaaggctcaaagcaataaggtgctgtgtctcagggacagcggaagctgagcaagctcaggagggagtgaggagaggctggccttcaggataagcagcctcgggtcacagtaaatatccccggacaaagagttaggactgaagggacgctggtaagctcccaccgaggacttgttatgagaaaagaaaacttttctgagttttcaataaatgaggcacaaatgagaaacttccagaacccaatttctagattttgttcttcatgaaacaaacgtgtgctagtaagagaaagacccaggagaatattagtggttttccaaatgtaacacctccaaaaaggactcctctgatttggaaagtgagcccttgggtgggcaagccctggtgccctcaccttcccgctccaccaaggtgaagggctcgctgtcccacccgtcctccagggccgcaggctgcacgtccaggtgcccgtaaatgcacacggttttcttctgggggtcgctgcctagcttgcccagcagaatgggaggaagtggtatctccgagccatctgggagctgagcgggagggagcaagggagggcagtctggttaataaactgggaatgtctcgaagctgttctgaaacctagctgggatggtcttgtctgttgtcatccatcagcctgcgttgtagggcttaagattatgtcttttaacagtccttaacaagaattcactttccagaagtccgctcagcataaactaaatcacatctacaactagtctgatgaactgcttaaggctgcttaaaaaaaaaaaaaaaaaagaatcaatagactcaatgaaacactgtagcctgagtctgagatacaacttaactcattttgaagtaatggctacaagagctacaatttgcaactgaatgctacattttcgaaattctgcatgtagacaactaagacaacagaatggatcatcagtcaggacattaatggaactcagggctgggagatggctcagcagttaagagtgctttctgcccttccagagaacccgagttcaagtcccagaacccaggtgaaacatctcaaccacttcaacaccagggaatccgatgctctcttccccagtctttgtagggaccagcagacagcagacatgttgctaacacacacacacacacacacacacacacaatccacagattctggtaaataaaatggtggcagagaggaccccagggctttcccctaaaggccttgccacctctccaggacacgcttgcataattctctgagactagaggaggattcagtgacacaaagacaaatcagtctcgggtcatctctttcccttacagagcaatggtaaccactgtgatgctaactgtgacccaagttggctgtacccctgccccgcagcccttgtgcctctgctggcacctacagttgatcagaaaaaccctgtggtgatggcaaactgccacaaggagtttgcaggggacaatatcagcattcgaacatgcttacttattttttatgtttatgtttttttaaagatttatttatttattatatgtaagtacactgttagctgtcctcagacactccagaagagggcatcagatttnnnnnnnnnnnnnnnnnnnnnnnnnnnnnnnnnnnnnnnnnnnnnnnnnnnnnnnnnnnnnnnnnnnnnnnnnnnnnnnnnnnnnnnnnnnnnnnnnnnnnnnnnnnnnnnnnnnnnnnnnnnnnnnnnnnnnnnnnnnnnnnnnnnnnnnnactgctcttccagaggttctgagttcaattcccagcaaccacatggtagctcgcaaccatctgtagtggggtctggtgccctcttctggtgtgtctgaagacagcaatggtggtgtactcatatgcataaaataaattaatttagaaaaaaatagattttcccccccctcatacaatatatcctgattagtttcccctctctctgctcctcccggttccttctctctcccctgccattcaagtcctttccctttctgtttgtttttagaaaagaataggattttaagagaacaacaaagcataactaaataaaatataataacataaaacagaacccaccacatcgaaggaccaggcaaacccagagaaggaaaagagaccaagagaaggcacgagaatcaaaggcccactcgttcccacactcaggaatcccgcaaaaacactgacctggaagcaatactgtacacacagaggacctggtgcaggaagctcatctttatacagtgactcagataatgtgtaacttccacatgtgaaagctttcatttctgggaaattatctcaacccttacgaatgacagtcattttaacttactcttgggacaccagcctccagttctccttctcagaataaaacgtgctgaataatcagaaaacctttaactcacccaaggcgagagtccctgggatgtacacaagagccagcacaagctcgctttgaagaaagttgagcgtcttcagccaaaggtcacgcttgcagcctcttcccaccctccaggaagaactgtctgctacagtgctgtgggctcataccttctgcttcccaatatccaccagttccacggagccccccagcctctggacatcggcagctgccacctccatcatccttctgatctctcctctcttctccggccatgcggacacgctctggatggccacccattctgcaagtttctgtttgtagagagcaagtggaaagggctccgagatgctgctttttaagagcaggcagggacgggctcaccagtggacctctattcatagctactccactttttatgagtggagcggacctagcttgcctgctccatatctggattaaacagccacaaacctgtgctgacctacccccaaaactaagcagaaataataataatgtaaaagagctggaatgtgtatttttaaccactaagcatacgattgattataagccatacaataactttatatctacagctgataaagttgcaacagaaaggaaacatatcgcaacgttacaatccgagttcacctgtctctctgaccgcagtccacactttctaaggtgtaagttttagagtcaaacgtttttttgtgtaaaatggttctcccaaaagtcaagtgaagtcatgattctatcagataaaaaagccgagcagcagattagaatataacatcagagagccattaaggacatgctcggttcaactgtttttgactatcgaaagaaaccatagatgagattagggaaaacagtgagccttatttgtagagacggataacttaaccctgtcaaataataaaggtatagctttcaccatctcgagaagatgaagaaacacaaagtttaaatacttcaccaaaacggcacaactcatattagcctcttggaaagctctcatgtgacaaagtcgagcaagtttcactactcactcagaagagatggaccctcaccttgacgtagcggtcctggttttcatcgatatactggaagacagctttgagggctgacatctttcaggctgacttcagaccggggaaactctgagtagagagagcaatggggtcagacctgcttgcagctgggactgaagggctgtggccagaggcactgtgtgaggactgagaaggactccaccctgtcagcagagcattgcgacacacacttatcacaggactccccaggaagtgactgcacttcagggccaagagcttaggagccaatcggaggcttagattgatctttccttcctgctccaaaggaaggctccattaaaatttgtgtccaaagaggagggccccagtggcagatgatctgatgaaaactaaaagtgggcactttgaaatcacatggatttactgtgcattttactttttgagagaaagtcatactatacaagcctggctgccctggaactttctgctttgaccaggttggtctcacagaaatctacctgccttctgagtgccaggtgtgtgctaccatgcctagggggcacttacttttaaaaaggttagacctttttttttttttttttcttggagacagaatctcttgcctctaccttctgaaagttggaattacaggcctaaaccaccaagctatgcttatgtggtgatggggatcaaaccgagggtttcttgcatgctaggcaggcaccctaccaacagagctagagatgtaatttgatactcttaaaggacagggtgaactattaaccttctattgatacagaggaaattatcattccagacatctctataaaaatgctgcaggctgggtgtggcagcacacacctttaatccctgcacagggaggtagaggcaggtgggtctctcaaaatatgaggccagcttgttctacacctagggaattctaggccagccaatgacaacctgcttcaaaaagcaagcatacaacagcctcccccaacctgcccataccatcaatattatgtgcaaaccacacctagctggaggagccagagagatgaattcagctgaggacaactaatgaccttggccacagactgcacaacctccttaagggccaaagatgagaaagctcccgcctcccaggagggtggctatggagagcagttgtatacttttttagaaagctataaggggtgtctgttgtttttactacaaagaaatggtcaaggtctgaggagctgtgaggcccaagtcgctcactactaggtacattcatgtatgaacaccccacagatatactcagtgcctacattttctgggcagttttttttttttttccttttaaaaataaaacagaatgtagcctaggctgtccttgaaactaatcttcctgcttccacctctatatgctagaattacaacaggcacaccagtttatgtgatactggggatggaacccagagattcatgtatgcttgacaaactaccagctgagtcacaactcctcttctgggcacatgtttcagcatcttcttttcttttccttttcttttctctcctctcctctcctctcctctcctttcctttcttcttccttttgtttgtttttaatgtatatgagtacactgtagctgttttcagacacaccagaagagggcatcaggtctcattacaggtggttgtgagccacctgcttggaaatgaactcaggacctctggaagagcagttggtgctcttaaccaccgagtcatctttccatagcatctacttttcatgcagagaccccagaaattctgcccttttcagaggcaggagaaagtaacttgtggaactgccttttcttgctttgctttatttatttaaagatttatttatcctccacatgcagataagagtgccctatcggcacgcacacttgcataccagaagagggcatcatatcatattacagatggttatgcgccaccatgtggttgctgggaattagaactcaggacctctggaagagcacacagtgcccttaatctccgagttatctctccagccccagaactgcttttaaataggaatcaatgtgaactacaaaagacgcggacactgggatttgcaactggagtttcctcttgtcctcaagtgtcaagacttagacttaacccagcatagaaaggtgaaacggggctcagatgttcatcctgcagtgacaaccaagtggcctaatgtcactaagcatggtctcaagtgggggctacagaaatgcctgcacatcacacttggtgaagagcactgtttgctggtccaggatcccagggcagtttctgaacagagttgactcactgtgacagacaggaagtgaggcagtcatttagcacactgaaattctccagcccagcaatgcaaagtcccagagcacttcagttagtaaatgtggttgctgctgagtgggagacggatttccttatttttaaaacctagcacaacgaaagaaaattttctagacccaccaccaccaccaccacctcacacagcctcacctgtaagggcctctgggaggctccagatgttgcccttacagtttatcagtgttaggttccacggtctgtcaccaactgtgcacagggaaggtgtctgttttcatgatgaaccctggaggtccatctgttacagtgggtgcttttgacttgggctcctggtccttgcacaaatccccatcaccgtggcgcagctaaactaacttcgttgctaatgttgctacgcaaagatgtcatgatctgaggtacgcctttcaatgagggcagtaaacagagaggtttcaactacactgcagagttcccacagcacatgaaaacaagccctccctctaaactgtccctccagacacagcaagttggccagcttccactctccctcccactaggatctgatgattcctgattcacttcacccaacatcaaggccttcagttgaaatcaggtattaaggtaaaaagcagtgttggtgggttgaacagaagcaaacttcctgccaaatacgccagcaccctcactgtctgtaagtcatgagtccttcgggaggagcacaaacaaggttcccaagatcgggtctttgcctcgttacgcggagttcgtgataacaagactctctggagaagactagcggttccagggtttcaaaggttagcagagtatatcaaacatctactacactttacaaatgagtaaactgaaactagtaaatgaatgggcgacctaatcgcaccagcaagctggcaatgggagacctctctcctgcggatccatcctagaggcaaggtccagctggaccctgcccagggcctttacacccaaggcgagccaggcagcattttccaagtgtaggcgtgaggaccgtccagctccctgcaccctccagtcccacgtcttcacgcaggctggcccagacagacagctcatccggcgcctcagggcgaactgggtgggccaggtgacctcgcacttctggaggtctgcggatcctatcccgcccctatggagggagaggccggggtcccaggctaagatcgccaaaaccgcgggcccgcgccagggcctggggtgactcaggcctgggctgactgcattaaggatcggggacctgccgggatccgctgctcccacctggatgccccggcgccccgcacttccacccagaccaaggcaactcaggcaccgccgggccctgcatctatcccgccccggttcccccgcaccctcccgggaaggaaggcccagggagcgtccgcttaccgcgccggttccgcaccacgtgtccctgcacgccccaccagccaatgtccggaggcctggggctagccccgccccagcccgacccgccctgacgacgctccccgccccaacagccaatgccaggtctcctcgggatagccccgccctcttaccgacggtctaatgtggagctctgaccccgccctgccggccgtggccacgcccctcctcggctggcgcaccctttcatgtccctcgctatacaaagcgcccggtctattgcttcaaagtgggttcctagaagtccccttctgtgcagcgcttggtgccagaccagaagaggtgtgaggtttcccagaactggagttacaggtggttgtgagctgccacgtcagtcctgagactctaaaccgcgacctctgcaagagcaaaaagctctctcaacctctgagccatccctcctggcctcctgcatctttaaagcgctgggatttttctttcatagttgcaagggatacagtttcgaatactgccaatattctaaaataaaatgagcttttcctctttaaattctgcgtgagccttctcttcaacattccttgcagaattttgccgagtgtagagttttatactaatagtcttttaactgatgactctataatacttttctacagttatatgcatatatatattttaaaaatttcttgtttgattaaaatacaataatatcacttcctttacttcattttcttctgccgtccccttacctctccaatttatgtctctttttctttaattgttacataatgataataataatgaagattaataatatatcttgtattatcctaacactaaggattaaactcagcatcccaagcactctagcaaacactctctcagatatatgtgtgtgtatgcatatatatatgtatgcatatatatgtgtgtgtgtgtacatatgtgtgtatatacatatacatatacatacacatatacatacacatacacatacatatacatatccatacacatacacatacatatatatatacacatatatacatatatatgtatatatatatgtatttgttgttgttgttgacttgatgggctttctttgaggtaagtgtcatggagcccaggctgccctggttggccttaaagactctatgaagctggacgtgcatttctgatcctcctgcctccatttcccaaagtgctgggattcctggtgtgtgctaccatgcctgacttaaaatatcgataatttttaaaaatttatttttactatgtttttaaattgtgtgtgtgtgtgtgtgaaccagaggagttgcataccctggagttacagatggttgtgaccacctgatgtgggttctgggacttggggttggtcctctgggagagcagtacgtggtcttaactgctgagccatctctttaatctgtatctataaacatgaagttattattgattttagctgctttcttttcttttgaacagggcatggtgtgtatgcctgtaatcagtatttgagaagtaaaggcaggaagacctgctacacagggagttcaaaaccagcctgggtttcatgagatcatatgtttaaatgactttaaaatccacggctctttcacatttcgacaaacaactttcagacattaaatgtaaaatcttggagtgctttaatcaaatctgctgatgttttaagaccttttgtacagctatctgtaaatgtgattattattgagatgaaaaagtatatggtgaatcgggcagccacagagaagtgatttgagggtgggggggttgagacaagatcttggccaccaccgggcgtggtggggcacacctttaatcccagcactcgggaggcagaggcaggcggatttctgagttcgaggccagcctggtctacagagtgagttccaggacagccaggactacacagagaaaaaccctgtctcaaaaaaaaaaaaaaaaaaaaaaaaaaaaaaaaaaaaatcttggccacctcaaactcaagaccctctaggctcacctttctgggtgctggggttgcaaggcaccaatatggtcccctgagagttagatagggctgactccatggtccatcctgttggatgtgcttgctgatgggcacttggcaggattgcactatcaagcaaagaagctgctgtaaaccgaagctagcaagaggtttgggatccagttgaaaataaatatgcttttatgtttatatgaaaattcatggtcatctgctgaaagttgaaaaaaaattttaaagaattatttattttatgtatgtgagtacacagctgtcttcagacacagcagaagagggcatcagatcccattatggatggttgtgagccaccatgtggttgctggaaattgaattcaagacctctggaagagcagtcaatgctcttaaccacttgagccatctctaccacccccgaatatatatatatatatattttaataatctgggataaatgtgaagaaaacacaaagcttatccttagccttgggcattttatatggaaataggcctccagaagatagaactttctagattctaccctttgaaatatgtaaatcacactcttgaccttagctacggcactaagtatcctcttccagtaagatggggctggatttgcagaactgaatttgcaacaggcaatgatttggagttgaaaaaagcaagactgttacaaggacacctggagttaacaagagctttatcagagctaactcctcattccaacacagagccggcacacagtgattcctgcgtgctcccaaaacccttggtcccagggacagcccctgcgaaatgtgaacaactggagactgaaacccaaactgtacagaaagctctgagctccgccccaaacagcaaggaaagctagtgtcatgtctctaaaaacccagcaggtggcgatgcaggccagtttcttaataaagggtacattgcaggttgaacagcaatacatctgtgtgtcaggagctaaatatgtactgttgtctttactgaatgtagagagaacagggacaatatgagggaaaacaaggagagaggtattgtaagaccccagcttaaagcatttctccctgaaaggtagagcccctcaaacattaccccaagcttgttatccctgatctttaaaaatacagctagaaagaagctctttgttccctatagccaacaaaaagcctttttgtttctatactttacaaccagagatgcctgccttcctgtgcccaggacacggagataaaaattcagaaagaactcactccccactcctgccttgtaaatttcaccaaggatacccggaagagaagaactcttcccaactcctcccaactcctcccaagtcctcagctagctgttaaaagccccctactgtcaccgcttggggtcgaactcccctgccctgtgatgctcgaggggttcatcctcagctagctgataataaaacctcttgcagtttgcatcaggtgtggttttatctcaggacgttggggtgttggccagctcatcccgggacttgagcggaggcccagcatcgggggggtctcacaatatgtttatgggagacaagagactgggtcctttggagaacatagggaatcacggaattatttattgacccgttttagcatacttctaattgctgaaattttcagtttccaaaacaacatatcatctccaggaccccactgaattctgatgaaccagtataattgggcatgaaggggataggagcacccatctctctgggaaacagttgcctgggtacaaaaacctaactgaaggacataatcttcaaatgtttaatctgtatttactgaacacaaccttatttgtttgtggtatgtcctggggggggggtgttgttttgtcttgtttttgttttggtgttgtttgtttgtttgtttgttttttaaagccaggatctcactttgtagccccatctggcctcaaattcatagagatccacttgcctctgcctctgcctctgcctctgcctctgcctctgcctctgcctctgcctctgcctctgcctctgcctctgcctctgcctctgcctctgcctctgcctctgcctctgcctctgcctctgcctctgcctctgccttccaagtgctggtgttaaaggcatgaactgctaggtcaagtccaggatacttatttttaaacaaacaaataaacaaacaaacaaacaaaccaaccaaccaaccataatgctatgctatgtaagatggggcatgctctatggaggtagaggcaacaggagtcagtgctcaaggttatcctgagctgcatagtgagagttgttgactggggttgactacatgccaccccaaaatgacaaacaaacaaacaaacaaaaagacaaaaaataggtatagaagtccagctttttgatggctctgaagccacttatatggaaaaaataaattcttacatgtgtgaattacttttattgctcaaaactgctaagaatcatcagagctatctggctactggtgcaaatggatgtatttcctgcaggactgtagcaaaccttcaatttgttaaaaagtaacagtgatgcaggttggagagatgactctgtggctaagagcatttgctactcttggagaggacctgggtttagtccccaccccctacgtggtggctcacaatcgcctgtaactccaattctaggggatccgaggccctctttcagcctcagtgggcctcaggcatgtataaggtacacatacacacaagtggacactcacacacacacataagaattataaagatagtaatgcagtatctaagactgcaacaaagtaagatacacctatatgttgaaagctaaacattatttcctcacttcctgttatctctgtgattggcagatttctgagatcctgccatcttgagcaggtgagcctggcctgatcaagtgagctccttgaaagaacatctagaccagagatgagaaaagccacagagcccagatgcttgctgcaggggaacagtctccttctgatcacaggaatgacctcaatattcctaatagaggtcaagatgctgacgcctccagtggctgagggcttctgtcacctaaagctgacaaccaagtgaatgagctggaaaatgattcttccccagtcaaggccacagttaagtgcagtctggtgtgcttgcggagttccacataatagttcctcatcaaaagcagtggggcagaaacctggaggcaggaactgatgcagaggccatagagtttcctgcttgctttccctgacttgcttagcctgctctcttatggacggtgggaccactaccccagggatggcaccgcccactatggactggctcttcccatgtcaatcactgattaagaaaatgccccacaggcttgcctacagccctatcttatggaggcatcttctcaaatgaggttccatgctttcagacgactctagcttgtgtcgagttgctgtaaaactcttcagcagaccaggagggggtgacacgaaactacaatcttaggattggggaagtagagtcaacaggactgtgagttggggccaacctgggatctgaggtcttttctcaaaataagtgattacaggggtgttttaaattgccaagtgtgatagtccacgatcagaaaatgaccctatattggctttctacttaagcactaaccttctgaagagaccccagggttggcctctgaaatgtttccatctgcccctccccaccccattctcacaactgtagctcaggcttgggatcctttcttttgtctactgggactaccatttctcaaaggcagctagtggccccaggatgagattccatcccatgtaccatccaggcctctgatccagcccgactcgcttccctcctccctgtctgcaagccccatcttctctctgctagtgggacctgggaaaccttgcagaaaaaggcaagtaagagatttttgttatagtgggctttgcttatctgacacacttagatgtgctcatacacgtgcgagattttaaacagtatcagggttaccgagtgcctaagggaacatcaattaagttaacttcatattttaaatatctttttcatcaaaataccatgtggccaaacctgctagagagagtacccatgataaaaacacctcaccctgaatatattgaaaatgtcagaatttttgaagttcagtaactcaaatatttgaaatatctgccctataaccaacctcctgccacaaaatcttttttattcttaattctgtattttattttttattgcttaatccattataaaaataaaatcacaataaatatgaaaatattctaaagacaatagcttgcaaaataaacatttttctgttaatttgttatcatcaccataaataaaattctattttgaattttaagtggcttttaataactttttattgtcattttttaaatttaattaggcattttcgtcatttacatttcaaatgctatcccaaaagtcccccataccctccccccccactcccacttcttctgccacaaaaatcttaaaatttaaggtgctacatccattcaatgatgaggaaagccgagtcactcccttagtccttaccaaatacatagtgtcagctcgcagatactttgttgtttgtttgtggccactttgaatttgtgactaacctgatcagtctgactagttccagtggctctatcttttcactgattgtattagcaaagcttttctagagtaacaaaacttatagaatgaatgcataaaaattattttatataaattaatatacaatatatattcattatatggtttaaaatcatatatatatatgtgtgtgtgtgtgtgtgtgtgtgtatatatatatgaatgaatgaatgatttattagaatggcttacaggctgtggtgcagccagtccagcaatgactgtctaccaacagaaggtccaagaatccagtagttgttcagtccacaaggctgcatgtctcgttggtcttcagttatactggaatcacagacacaggttctaatgctagtgaaggaatggagttgctagcaagagtgagacaaagcaggcaaagagagcaggctgtcttcttccaggtctatacacaggctgccagcagaaggtgtggtgtctgattaaatgtgggtcttcccacctctagaaagatctgaattagatgtgcatcttcccacttcaaatcatttagttaagagaaagaaaatccctcacaggtgtgccgagccatttgggttttaattaattccagatgtagtcacattgacaaccaagaacagccatcacactggtccttgaattaaatcttttttttttgtctgaagtagagcttttctttagatttcttgtattaatcagattcatgaaggacagactctgggaacagcagtgaactgaatactgggcagctcctgaactctggtctcatgagtctccatgctgatcttcccgctgacctcacggtgagccattgaggacgcggtaggggtatgaaaaggagaatctctctgtggttgtgcaaacgtgccttgaggttacatcaagtccctgaaagccaaatagacttgtgagtttttgtgtctttctggaaaataaataaataaataaataggcagttaatgttcaaaaaattttcacagcattcccaaaatgtagcttagttcccattcggcatttctaagtacagcttcacacagctttttatctttttgatgtaaaagagaaaatgatagcttcatttctagttacagagtgtcttaaaaaaaaagatttatttattttatgtatgtgagtacactgtagctgtacagatggttgtgagtcttcatgtagttgttgggaatttaatttctaggacctctgcttgctcccatcagccccactcagtccctgctagctcctgctcaaagatttatttattattataaataagtacactgttgctgtcttcggagagggtgtcagatctcaatacaggtggttgtgaactaccatgtggttgctaggatttgaactcaggaactttggaagagaggtcagtgctcttaactgctgacccatctcgccagccccaacagggtggtggttctgtttgtgaccgaagggaactgaagatagactgtgagtggggacatgaaaggaaccggtaggaacactaagggcggactaatgctaaggcagggggtgcctggccttggtgactgtgagacagcagagaagggtccgagatgagtgctgtttgtccagcttgctcactggggtctgtttcctcctgtacctcacgtgggaacgtcaggcggagttatgtcgccgatttctccttagtctttcatgccggtttattctgctctgcttgactttagatttggaattgtaacgatttcaaaataattttggaacttcacaaggaacaatgctagttgggatttatcacctgtttgagctggaatctgtaatgtccctcaaggctcctgtattgaaagcctgctctccaggtggcaggactattttgggaagttgtggaaactttgtgaggaggggcctaggactggggagttgttctctgtggaaagcccttggcttgcaagctgtgtgtcttgatctctctccctctccccctcctcctcgctctcttctcccccaccccttttgtgtgtgtgtgtgtgtgtgtgtgtgtgtgtgtgtgtgtgcgtgcgcccgtgcgcgcgcggggttctctctaggtagctgaggctgatcttgaacattttgtaacataggctgatattcagttcgaactcctggtgcccctggctcttggattacaggcatgtgccacaagggccgatgtgtgctaactactgatgttttaaaacgctacttttcatatctcacatgtgcttaaaaatatccaaatatttgaacattatgcttacaaattcatcctgaacatgtgtgcatacatttatacatccacacacacgtttgcttctttaaacttaccttgtgtcagttatgtcaagaggagtcagatgctaagtttaattactttcattgaagtcttcttcagagccgggcgtggtggcacatgcctttaatctcagcactcgggaggcagaggcaggcggatttctgagtttgaggccagcctagtctataaagtgagttccaggacagccagagctacacagagaaaccctgtctcgaaaaaaaaaaaaaaggctggagagatggctcagtggttaagagcaccgactgctcttccgaaggtcctgagttcaaatcccagcaaccacaaggtggcccacaaccatccgtaatgagatctgacaccctcttctggtgcatctgaagacagctacagtgtactatatatactatataataataaataaatctttttaaaaaaagaaaaaaaaaagatgccttcttcagatcgaagatacagggaattaaatacaatagaagtatgtgatctctccaaaagtcacactacttagccagtctgtggtgaatttctgcccaaacagcctttcgacattttatgtgtcactatgtgatttataaaagaaactgcacttagttctggttggggcagcttattgctatggaagtcagggtggatataagttgacggtctcgcccatttctgccagaattcttttgctccctcccctttctttcttctttgagacggatccttactgtgtatcctgggctggtctggaactcactatacagaggccggcttcaaactgggtttgatccttctgtttctgcctcctgtgatgctgggatcacgggcgtgtgctcacacacctagcttagctacctctcattttctcattgtgtgtgtctatgagtgtggtatatgtgcacactctgtgaagaccaggggacccggtagcctgatttaccattctgcccgtattcttcgtcgacatggtttctcactgaatgagagctaggctggagtccatcagacgttgttgagcctcctctctctaccaagcacatcagtaggtcatacatgtgtagagccacatctggacttttctgtgggtgccaggaaattgaactctgctccacatgtttgtgcagcaagcacttaactttctgagccagctctccagctctacgttttgtttttattagagaagtgaaaagattggggggggggcatttgaaaacatccatcatttgtatactatttattggcatttgggaactatatttcagcctctatcctatttcagaatgtaaacagccctaaaacttttgctaaaaaaaaaagtaaattgaaatcacctatgctctggcacatatcaaggtctgtgtgctggcagtggaatccatccaacaagattaaaccagggacaagggacgagccctgcacttacagcacactgaggtttcctttctattggatcctcctgagactggagttatgggtggctgtgagccaccatgtgggttctaggaactgaaccttggtcttcaacaagagtgttaggtctcaaacccagacaaatggctctcttgggtgtctacttaacatacctaactgggactcgacactaggttcttccagcatcctttagaccctagctgttacagggtatgccatcccatcataaacttctccagcccaggagctgggctgctctttccccagctgcccttcctgatataacgtagctggttacccagctctttctccttttggcttaccctttattctcctggcctttcagtctggttcttctctctcccttcctcctcctcctcctcctccttctcctcctcttcctcctcctcttcttcctcttcctcctcctcttcctcctcctcttcctcctcccaagacctggctcactctggactctcccagatatctctgcctctggctatgctctcccttctatctacaataaaccttcccttcttccaccttccaccatacttagcaatggttctctctctttctttctttctttctttctttctttctttctttctttctttctttctttctttctttccttccttccttccttctctctctctctctctctctctctctctctctctctctctctctctctctccctctttcttttatcattcaaacagcaggtgttcttaacctctgagccatctctccagcacctacaatgtatattcatcatctccattcatcactacttttccccagctccctctggtgccccctaacccaactctccctctcaacttcatgtctatctatctatctatctatctatctatctatctatctatcatccatctatctatctatcatctatctatctatctatctatctatctatctatctatctatctatccatccatccatctatatttgagacaggatctcttttgtaaccctgcctggcttggaattctctatgtagatcagcccgactcccaaactcactgagatctgtcttcatctgcctcccatgcgctgtaattaaatatttgaggcaccacacctggctaatacccttaaagattgttaacatcttcctgattcccactagttctatctgaatgttctacattagtccaatgtttttgaaaaggagacaaagacaagaaaaggagacatactgatgaagcccagggttgagagatgcactctggcagaaaacgaaaacacactaaggtatttatttaagctgggcatggtggcacactcctttaatcccagcactcgggagatctctgtgcgactgaagccagcctggtctacatagtgagttccaagacagccagagctgcattgtgagcctgttaggtccaaaggacaatcaggacaaaaggctgtggaatctgttagtctcctaccgtgtatgctggccctctcagcatcactgcaagaacctgtgcagaacctgtgcactgtgacatcctagctcccttagcgcttcccatcccagcccctacgctaaacttctccagcttccaaccctgtcattttggccacacagttccttggctctctcctcctgcctctctcttggttctcctctcttgctgcccctcccccatgccccagttcactttgcaggccatgcatattgtactaatttctctggacactttcagatgcttccggctgttctcttcctcaaatctacaataaaaaccttctcaaccataccttggagtggtcacgtcctcactttacacaagatcctgtctcaaaaacaaaaacaaaaacaaaaaaacaacattttttttctatttaacataaaagaaggaagaagaagcgacaacacatagaattcaagtggccaaatggcacattcgaattctacctcatcgatgattaataaatttaagtgaactaaaggttctaacaaaagcagagattggccaaataggtaaacagacctgacccagctataacatgtatccgtttttggagatttgtgggagcccttgtagaataggaaattctgggtcccctcttgagacccttagtcttattaataaaataatttaaaatgagacacaaagaaagtccaaggacaattttattacagttcaaaagagaaatcccatggcagaaaactgtagatcttggcagccacctggagaagaatgatggagaaaggaaagagaaagcctggctcacatcacaggcacagccatgtgatggacgagcattcacatggaaaaggcacagccatgtgatggacgagcattcacatggaaaaaggagctttggaagtaaagaagaagcccttgatgttagggaaaggatgcttagaaaagagaagaaaagggaagcaggtctcacaacagaacttcacgatggttctgtagcaagtgcagagctggcaggctccctaggaaggcaaagctccttgtaacacccaagaggagtagaaggcaggaaataatcaaactcaggggtgaaatcaaccaagtggaaacaagaactattcaaagaatcaaccaatcaaggagctggttctttgagaaaatcaacaagattgataaacccttagccagactcactagagggcacagggaaagcatcctaattaacaaaatcagaaatgaaaagggagacataacaacagatcctgaagaaatccaaaacaccatcagatccttctacaaaaagctatactcaacaaaactggaaaacctggatgaaatggacaagtttctagacagataccagataccaaagctaaatcaagatcaggttaatgatctcaacagtcctatatcccctaaagaaatagaagcagtcattaatagtctcccagccaaaaaaagcccaggaccagacgggtttagtgcagagttctatcagaccttcaaagaagacctaattccagttcttcacaaactattccacaaaatagaaacggaaggtactctacccaactcattctatgaagccacaattactctgatacctaaaccacaaaaagacccaacaaagatagagaacttcagaccaatttcccttatgaatatcgatgcaaaaatcctcaataaagttcttgctaaccgaatccaagaacacatcaaaacaatcatccatcctgaccaagtaggtttcatcccagggatgcagggatggttcaatatatggaaatccttgtaacaataaggggataagcattcctcctgtcttttcaggatggccttatgtgaaccagcgtaaggggtggtccctaggccaggtgactgaatggtccaatggactaactctcaaggaaagagccaatgacatgtccccacccagagggagactgcattctttactggaacacatccatagggcacataccttgaatccaaagatgtaaaggagtagaaagaaacaaaggagaaactatacaacatgaacaatgccccaaagggaaaaggagcaactatacaacatgaacaatgccccaaagggaaatggaaattgcagaagtttggtcatggttcttcctttcagtcacatgatcccagaagtaagactcacactcagaatatatttacaaacaccttggccatatagctaggctcttctctgactagattataacttactataatctatttactctaatctgtcatgtggctggttacctgtgttcaggtaccatgtgtctgtctcatcacatcttccctgagggaatcctgcacctggctctatcccagaattctttctgcctctggatgtcccaccttctattgagcccttttccattggccatgggtcttttaattgctaggtgatgatccaaacaatacataagatactctctctacaaactatttacatcgagtcaaaagaataaactttatgattaaattgttcctacaaacaatgacattacaattgtataattatataattcagggggtaagacttcagaaatgcaaacataaacatatacttgccttcttgcctcctacagtgtagaagccactatcagtatacagagattccaattacacacagcagaggctgtcagaattatagggaaaagaggcaattcaatagtaacagagaccttaatggtccactctcaacaaaggagagaacaaccgggcagaagatggataagaaaagagactcttgaacattcctataatccagtcatacccagaacacttcagcaacagcataatattcattttttttcaagtctgttctatagcatatacaatatctggagccacagagcaaaccataatgaggtaaaaaaaatcatacaaagattctcttctgaccacaaattaaaataaataaatgaaggaagtttgggaaagccacaaacacgtagaaatgaaagaacacactcttttataaacaacgggcaaaaattttcaaggtcatgagggaatttagaaaatacttggagatggattgaagcaaatgtatataacatggtaaatgaatgggatgttgggaatgtagctgatgccggggtgaagggtctggggaggaagggtgggagggagggcgctgggaagatggctgacaataaagagcttgccatacaggcacaagggcctgagtctgaggcacagaactcacaaaagagccaggcttggtggtgaagaaatatagttttccgcttggctaatgtgcaccaaagctgtttgcagatgcttttcccttccccctgctgcttgaggaatgttcccttttcctgccaatgtaagcaagttcaatagttcaataccacccagccccttccccatctgagaagactaagaggtcatgaggaccatagctgctggagcaagattagctgttctcaaaaattagctataacacagataacattcctttgaaaccctgcctcagtttgaattcctagataaaccacatactgccctcaccttgctgacgaagttttctggcacatcaatagctgatccataagttcaaaatgtgctattgctttgctgaccgaatcataataacccaccatgggggcaagcaaagtgagtcactaggccagagatagttactaggataaccaaccaatgcctggaaaggttacttgctacaccaattagaataagacagctaccctgttgctcatatctgccccttacaacagtattaaaaagtgtgttctttctttgttctgtgtctctcctctggcctgcgtgctgggaggggagtccccaacatgttgaatcaataaaaatcctcatgagggttgcagcgattggcggtctctgtggactttgtgggtgagggtcttttgacgaactccaacagtggcaaacactttcaagcccattgctggcagagagtgaaagatttctagggcttactgggcagtcagcctacttagaacctggccctagagactatctcaaataagatggagatttcttgaggaacagtagctaaggttgacccctaccttccacagcccatactctccttcctacatgtatactcaaacacatatgtgccctaccacacctcaaacgaaagcaagagtaggaggaagggctcttggggacagtggttccataagtctttgcatgcgttctaactcataacacaggaaccacagccacacacagctaattgttcatacgttggtttaaaaatacagttgtgacagggtgtggtggtgcacgcctttgatcccagtgctcaggaggcagaggcaagaggagctctgagcttgaggccagcctggtctatagtgggagtcccaggacagccagtgctacacagagaaaccaagtctcaaaaaactgggaaggaaggaaggagggnnnnnnnnnnnnnnnnnnnngaaggaaggaaggaaggaaggaaggtaggtatttgtagaggctaatgtctgcacttattgctatggggaaagacaggccttgagcgtgacgctggaggtatttccactgatgggcacccacaagaccatcctatagaacgtctatagctttctatagagcttgtatgtttgcttatattccacaactaaagtatttgatttaggcaaaggaaaaaaaataaacaaaatatagatgcctagttctgctgctaaacaactcacaagagagtttccaaaataatgaaagactttaaggaggaccacgaaaacaccattatttaaagtagaggaggagagtgcctctcaccccttccctacagatgttctggtcggaggttgatctgagtcagagaagtagtgcattcctaaagaactctggagttcagatgtgaaataggattaactgccttcccggttatataaaagagctgttgtttagcactgaaagtgactgggtttgagcaggtcaagatgtcaggggtcagggtactgaaagcagtagatgtaacggggttgaaaccctgctttctccttacaccacgaagacaagcgtttgctttcctgtgtcctacccctgctgttctgctctggaaacccctcccagtctcctccccatccattcgtacatcactcaggctggagaagctgcagttgcagcagggagcccaactcaaagcaagaagaaaagatacttcttcccgatcttcgggagtggagagcaccaaagtgaggctttcccattcaattcaagctggaatctcttaagtgctaaatgcatgaagcttaatgagtcctcaacggaaaagatgacgcctcggaatgtgaagaacctggcggtgcaggtggaaaggaagacggggaggggagaaagcgggaggggagaggggtggagcagaggagttaggaactctgtgctgagataattgttctgtgcagatgacaggcagctgaagttctttggtttgttcggtgatcagactagcattgttaacttgcatcgactggtcccatgggttctgtaatcctgtaccttggcaagcacgcaaacttttgtaggctttttttttttttttttttttttttgccatggactttagatatgactttcaatcaaacctccccaggcatgtcttaaagatagattattttctgatttcatactaaggaaaattaacacctgtgaaatgaaaactcctgaaaagcagctgtctgcagagactggagaagttggaatgtcgcaggtccagaggctaattgccttaacttgggctagttctagccctgggaacagtcatttcttggccacctctataagaaaactaacaatagtgtgatacataagaactctctggagtctattgacttagagatcagttggcttccaccacctccaaagctatgaaggtcatcggatggtgtcttagttagggatacgaatgctatgtgtgattagacaccatgaccaaaagcaactccgggaggaaagggtttatatttcacctccagttctatagaacagtccatcaagaaaagccttgagggcaggaattcaagtagggcaggaacctggaggcaggagctggtgcagaggccatggaagagttctgtttactggcttgctctgcctttcctatagaacacagctttcttatagaacacaggaccatcagcacagggatagcaacacccatgatgggacagcatcacccacgatgggtggggcctcatcccatcaatcactgattaataaaatgccctgcagccttgcttatagcctgatcttacagaggcatgttttcaattgaagatccttcctatctgatgacttctaacttgtgtcaagttgacataaaacttgtcagcacaaatnnnnnnnnnnnnnnnnnnnngagcacacaggcagcaaaccccagaaagagaccatgctcttcccataagttttgaaagaacccctcccgttgattaaatactatccacaaggcctcacttcttaaaggtcttactatttctatagttttaagataagggctaagaattgagtacatgaaactataatctaaattatgatttaaactataatttagcttgggtcaacataaaacaggttccaaacacaataagaatcagttaattctgtaactgtggctcagaaatgtgaagtcacatcctaacaaataagaggctacatggacttttatagtcaccgaacaaatgtcatttaactagtgagctactaagcacactggtgcggacacagggtgggggttggtcacagttcagtgaggatatctctgcacggtggagatgactctgctgtaggtcccagaggctgatgagatttttagtttggggattatgaatagcaagtgggccactaattacaaattaatacattccaaagattttacatgatattagatcaaatatagagatataacaagacattaggtcaaatacagagactggtgataaatggctattaaaggatctagaaagagcccccagatacgttggctcatgcaacactcttaattctccacaacctcaaggttctaaccagtcaattgatctgcagaatttttaacccagggatagttttagtccaggagatcttgttttatgcttccatggtcaacaccacagaggaaaaagcaggctaggaatcaccagtggtcggaggaggagctccggacttggttcttaatgagagcagggtttgaattggagagcatgagcaaggtgtatggcagtggctggctgctcagttcgggtgtgttgactgccactgcctcttaaagggatagcgtggtaaatctaatgtgatttatgcccgcaatacacatttgtgttttgtaatgtatctctttcaggcatttgctttatcattaaatattaatgtcgataaaagaaaatatataatgtcatgaatctattatgagctgctttcacagttcatttttcaggagaggttttttttttaaatttttttatttaaatcttatcttcattgtctcagtgccaggatcattcaaaaatttaacacaatgcacaggacttagggagtggctgagggtgagtggctttcctggtccttcacagagaagttggtggtcaagaagaagctgtaccaagctgtaggtgtgagcagaagtcggaagaggaacagtgctgacctgctctgagggcaacagaaatgtgtaagaatcagcacagttgaaacttgttttgttttgtacggttttgttttgtttgagacaatgtttcactatattgacccaaattgccaacttgaaaagctatattctgcttgattccaataaaaagatcagtggttaccagggggtgtgggggagagtgggggtgatcaggtaagcactgcagactctggcctgcattttagatccagggtagaaagcccttgttcaaacccactgacgggacacacccagagtgacctgcataggacccacgggcttcgagtaaatgttgtcaggaataaattccagacctcaagcagaccaccgctccaagtgaagggtcttgacaggacaaacttcactcttgatccagaggctgcacccggaaaacagcaggctcatctgcctgtggaggaagcacgctgggttttattctaatgcctgtggttgctcagttctttccccattgtctgggcccaacctcacactcttttcctattggctagctttaaagagactcaatacaaagctgaagaagggggaaggggccggacactttaatccaagactgtaccggggcctttgagcaaacaaaggttttatggggtgggagggatgaaagatttgaattctttgtcataaaaacgttttatagtgtttgatagaaaagattcacttttaacgtttcttagatcttgacgcattcctacagttcctggtgctccaagtgaggtggagggtggagacaacagaggaccacgcccacaaagggtggggcacagacaggaaactaccctgtctgcctctgttatttgtactataaggctaacctttttctaaaaacaaacaaacaacaaaaataaatgcacatccacaaatccaagtttaaattcttttattttatttttttctgagacagggtttctctgtatagccctggctgtcctggaactcactctgtagaccaggctggcctggaactcagaaatctacctgcctctgcctctgcctctgcctccgagtgttgggattaaaagcgtgcgccaccacttggctccaagtttaaattcttatctgtactctcactctcaaccgtccagaagtggaggcaggaggattggaagtttaagatcctcttctgttacagagtccaaggcaagcctgggctgcatgagatcttgtctcgaaacagagcaaaataaaagacacatgctctctctctctctctctctctctctctctctctctctctctctctccctctctctccctctctctctctctcaactttattttaaaaacaaaagccaacactgctgtattatcagagacgtaggaaggatgcgttggggactaggacgttactaggggcnnnnnnnnnnnnnnnnnnnnnnnnnnnnnnnnnnnnnnnnnnnnnnnnnnnnnnnnnnnnnnnnnnnnnnnnnnnnnnnnnnnnnnnnnnnnnnnnnnnnnnnnnactgtgatcactccagccttcgggatcccaagactctgccccaatagagcagatcaaagctacataaactcagaaagaccatgagacctggggagcaggaccaggtagcacaaatttctctactcccctccccccagtgtgtgtgcatgttcttgaggtgcctctggaggtcagaggtcaacttccaatgtctgggacctgttacagaaggaaggccaggaaaaggttgtatatttcctaaagtcacagaaaaatcagtgcaactgtgggtggttagaaaaccacagaggctcagggccttccttacagctcgtttttgatagtctgtccctaacctggagcttgctgggtgctctaggctggccagtgagctccaggaatctatttgtctctatttccccagcatactttatggatgagcacagaccttggcgatcagttacataccattgccaaatgagaaatgacaattctgggatgtcacattttcctaaggatgcttgcataagcttctcagtgccaagtggcatgacacagttttcccctgtgcgtcactctcatgggattgatgtgcatctcagacaggaactcacaggaagacacccatgtgcaaagggttagcgtgggggtgactaccttctggagggaaatcccacggcacagctgtgggtggggtgaactgaaggctgcagttggaaactacggtgggacctgttacagaagggaggccaagaaaaggttgcacatttcctaaagtttagtcatagaaaaatcagtgcaactgtgggtggttagaaaaccccagaggctcatcataccaagctcagtccaaaatggagcatagtgagccgatcagtgcaaagcattctgggtgagcccaggaacaacaaaggcatcagctaaacagaggagtgggagctttgcgtagagactccccttagttcccccaacaggaggaaaggggcaggaaatgactgctcctttgcagttcctgggccttaatgttgctggtgttcggagaccaaaagggaagcagcccctcattttcccaagagatggcccagcattccagacaactctagggctgggaccagccaattcttttctctactcacagacctctatgacaagctgggcccagtaagtcttgaggacttgaactgacacccctaagttgcagttctatcatagctggatataattgggggacattacttaagtaaatggttctgttgtatggccacttccgacccttaaaaatgaaaataatgactatttatgaagtacagttcacagttccaggacataccaccacgttgatcctagaaagtcatcagtgaatttaactagtgcctatcggcaggacaccgagatagatccgatggtatgtaaaatggtgcaaacattttgggaaaatcaactggctgtttctttaaaagttaaagtctagggaacaggagatggcccagtccttagacgtacatgttgggcaaccatgaggacctaaggttgaatcctgacgtcctcttagtgtgctgagcatggtcttgagtgttcctgtctccctaagtcatggaggaaagagacaagggtatggccaaggcttgataactgccagcctggccaaaaaccacgagttccagattcaaggagagaccctgattcaaaggagtaagtcggataatgatagaagagggcattcagcatcatcctctgacccatgctcacacacacgtgcacatatgtagcccccctcacactatgtgtacatgtacaactctctgtctcacacatacacatgtgcatatataccccctcacccacacatgtgcacatatgcccccttacacacacatgtatatacacacttctcacacacatgcatgtctgcatataaacatctttactcacacatgtacacatacacacacacatatatatacatatacacatatacagcttcctcacacatgtgcacatatacacatatacacatgtacacatgtataatatacacatatgcacacatacacatatacatacatatacacatatacacacatacacatatacacacatacacatatatacatatacacctatacatcttcctcacacgcatgtacatatacacacgtacacttgtacaaaatacacatatacacacatacacatatacagcttcctcacacaggtgcacatatacacctctcttctctcacacatatatgcagtatacctcccatgcacacacagatgcacataaaacttaaatacaaatttaccttaatacctaacaattctagaacccagaaataaaagcatacatctatataaagacacgtaccacagactcccacaacagttctacgtgcaatggcaaaaaaaaaaaaaaaaaaaaaaaaaatagatgggcgggaggaaccatttagatgttcacaagctgacaaagtgctaaaatattcagtgctgcgttgacacgatggactcaactgtaatataaaagaaatgaagtgttgatatatgttacaacacggaggacccttgggatggttgaacaaaaggagatcagtacaaaagacatctgttatacgatcctagatgtacaagatgactacaaaagtaataatgaaatcaaatatggcctatcttgccaaacagtcgcacaaagctcgaggacagctctggctctggctggcttctcatgctgaggcagccttgcccagccacatggccgggagatgtgaagcccttataggctcatcacaacccacctcatatacgtagtgtggacaaacaccagggtggccagtgaacaagtgtgattttcccaggtatggaaaaaaatagaaatgacagatattctcctgtaatattttcccagaaacattatctgccacctttttatgccatatctttcggcagacagacagacagctacgatttatgtaatcccttctgcgcatgctcaggttacctccagtgttgttgctactatcagctgggtgtcaagctctgcccttgccccgtctgtacagggcaggtatctgggtttattcattggatggttctaggctctcactttccatggcagtaccctggttccccctttcttctcacctcttagaaatctgtcctctgggccaccgggaacgggaagcccagaatttcacaggccatcatggcaatcaagtggactggtggacattcttctttaatcctttgcctaaatgcaaataaagacaggctggtggcttcaggaggagagggtggagaccttgtggcttggggtgaagatgggaccccgttaggacacatgcagttggaaggggctcatgatgttaccagcgtcttgttttctgcctcctgccccaccaagctctatgcctcccatggagaaaccatcagtgtactagatgtcaggtctctttaagggttcctggaccacttccatgtgaattaggaagatatcaactgtctttcattaaatgaaactgaaagtctgctggtttcggctgatgactctggggcaatcaaaatcctggacttggaaaagaagaaagttaccagagccctgaagagacattccaacatctgttcctttgtggtttttcgacctcagaggcctcagagcctggtgtcatgcggcctgaatatgcaggtaatgctgtggagtcttcaaaaaccccgtcctgtctgaattacaaatttacaggaggatgaaacagaggaaaccgaaagccccccagacccttagtcggctcttaaaccctgcgctagcccactctgtctctgtagcgttgtgcagtaatatttttagctgtggtgcagaggatggtaaggtgcgcatcttagggtgatgggagtcaaatgtgagcgagaactgggatttaagggtcacactttgggggtatcccaggtctgctttctgcccgagtccagtctgctacttactggagggaatgatgggaggatcaggttgtgggatgtgagcggaaagatggagaagccgcagaagagcccttcgaggcacatccacaggaagaaagcaaagagggcagcgtggtgggaactctagagccctgggagctgaggatgaggggcatgcaaagaatctgccgaagctcgatactgaacacggagaaaaagtgaactggcttttaagtacaaaacttaaagggaacaaaagcatattagtgactgatcagacgagttgtgtgtctttgtatgccctaagtgaactttaggtccaataaaatgcattgcaaaactaaaaaaaaaaaaaaaaaaaaaaagaaaagaaaagaaaagaaaagaaaagaaaagaaaagaaaagaaatctgtcctctggtatacaatttccagtacgcacagcttggaacctcaccaaggcaagccatgaactatcacagaaataaaatctcattttaaaaagtgggcccatttcacttaagtggaactgggaaagatattcttgtgatgatgacatcgctagcatttctaacgcctgggctgtgcctggtatgtgatggtgacgccaaatctggtgtcctctacagattttcactgccccaaggtggccagaaacttgcttctctgtgtccccacatttgccccacgtgcgcgaggaagccactgctgtcatagcagaggacagagcaaactgtgcataagttaaattctttttttctttatatttctttattttttattagatattttcttttttttctttccattttttattaggtatttagctcatttacatttccaatgctataccaaaagtcccccatacccacccacccccactcccctacccgcccactccccctttttggccctggcgttcccctgttctgtggcatataaagtttgcgtgtccaatgggcctctctttccagtgatggccgactaggccatcttttgatacatatgcagctagagtcaagagctcccggggtactggttagttcataatgttgatccacctatagggttgcagatccctttagctccttgggtattttctctagctcctccattgggagccccgtgatccatccattagctgactgtgagcatccacttctgtgtttgctaggccccggcatagtctcacaagagacagctacatctgggtcctttcgataaaatcttgctagtgtatgcaatggtgtcagcgtttggatgctgattatggggtggatccctggacattacagtgtcaacttagtccatcctttcatgccatcagctcctgtatttggacatcagaaaaacaagagggtgttttgttcccacttctaaggaggggcatagtgtccacacttcagtcttcatttttcttgagtttcatgtgtttaggaaattgtatcttatatcttgggtatcctaggttttgggctaatatccacttatcagtgagtacatattgtgtgagttcctttgtgaatgtgttacctcactcaggatgatgccctccaggtccatccatttggctaggaatttcataaattcattctttttaatagctgagtagaactccattgtgtagatgtaccacattttctgtatccattcctctgttgaggggcatctgggttctttccagcttctggctattataaataaggctgctatgaacatagtggagcatgtgtccttcttaccagttggggcatcttctggatatatgcccaggagaggtattgcaggatcctccagtagtactaagtccaattttctgaggaaccgccagacggatttccagagtggttgtacaagcctgcaatcccaccaacaatggaggagtgttcctctttctccacatcctcgccagcatctgctgtcacctgaatttttgatcttagacattctgactggtgtgaggtggaatctcagggttgttttgatttgcatttccctgatgattaaggatgttgaacattttttcaggtgcttctctgccattcggtattcctcaggtgagaattctttgttcagttctgagccccattttttaatggggttatttgattttctgaagtccaccttcttgagttctttatatatgttggatattagtcccctatctgatttaggataggtaaagatcctttcccaatctgttggtggtctttttgtcttattgacggtgtcttttgccttgcagaaactttggagtttcattaggtcccatttgtcaattctcgatcttacagcacaagccattgctgttctgttcaggaatttttcccctgtgcccatatcttcaaggctttcccccactttctcctctataagtttcagtgtctctggttttatgtgaagttctttggatattttctttatatacatttcaaatgctatcctgaaagttccctataccctccctccaccctgctcccctacccactcactcctgcttcttgaccctggcattcccctgagctgaaggggtctgcaatcctataggtggaacaataatatgaactaaccagtacccccagagctcgaatctctagctgcatatgtagcagaagatggcctagttggccatcactgggaagagaggccccttgatattgcaaacttcataagttaaattcctgctctacctaaactctttcaagtagctggtaaaaatggtaactgttggaagtgctcttggcccgaggcaagacacctgtgtaaacagcaatgatctggatagagtgtgataatttagatattaaatatgcctaaaatctgtatgcttggtccctagtgtgatactcaggaggtgggactttcggcaagtgcctggaccctgaggggtctgaactaatcaatggattgatgtgtttgttatgggtccataatttgagagcatcattgagaaatggcagaaaccaatatgtagggccctgtttgcagaggtaaatgatgggagatgtggccctgaagggtacaagttcttagtcgtccccccccttccctttctgcttcctggccatatgaagggagcagcttcaatgcccagcgtgtgctcaccacaatgtcttacagaaagactgagagcaacagccagtggccacagacagactcctccgacaccagagatcaaaattaacctttctgtgatgtatgtattgccttggagtcctttgggtgtagacccaggagtggtgaagttggagcatgcggtggatttagctttagcttgttacaaaacctccccacagtgtgtagactagtcaacactccaagcacagagcatggggttctcccttggcactgatctgctcctgatctctgtcagactattgaaaagtgggccttccacagtattctccatgttcatttctagagcaataaatatgtacagaatcccgagacagagttgaggacactgaactgatcagtgagtgactgggcccataacagtctcctttctaccgacagaccatacagaagaggtcttcacccagactagcatcgtactactacctcaatctgtgcatccgtttctccagcagcaatgaacaaagctaatgagtacaactgaataaagcactctgcagtcacaagtgagagttctcattgccaagaatttggtttttttttttttttacaaagtctttgtaaattcatgtaatttagcagaatgagaacgaataacctcatgtgtttagaaaattacagaactacaatttcttctgctaatagcctacaagcaacctattcataccccgccctgggtgacaagttcagctatcaagggaagaggtgagaacccagaggatatgttcaaacatattcctctccccacaatgcatctgcactgttcaacatcgcctccagatatcagatagaaatatttatctgttagaagcaatttctcaagaaaaattcttcagggtactcgaagctttctgatcttctgggggaaacactcgcaccatgttccactaatctatgcggcaagcatattttgtattgggttttgggactacagaatacagtaagatacagccctgtccactgaggatctggctgtgccagagatgctcaaataatacagaatatctcagaaacaggacgtgttccttttgctgaatgtcagtgggtctttagaatggcttgtgtatgaaatgtaccccaaaggctcctgtattgaaggcttggttcctagctgatagttcttatcattgagtagagattaggtccagcgggctgactaatccattgattgatccatattctgatggagttattgaaaggtgatagaaagtgggatgcaggtcctgactggaggtaggaggtcacctgggattaatcttatgccctgcccttcctatctggcctttgcttcttggctgctagatgctgaacagccattcttgcttctgtaatagtctgtgtcatagatgcatggagccaaattactgtgggtggaagtctctgaaaccatggaccagaataagtccttctgtgtgaatactatttttctccagtgtcatagtgacgaaactaacaaaatgatagagactctgggtcatgagcctgaatttagaatttgggggtgtcctggggtacctcttgtagaacttttgactcagtagtgatatggagctaaatttacaattccttcaaggcaagggaaaacaacttggtaaagatctgcatagaggaagtttactactgtgacgggaagaatctttgtctcatttctcagtgttaggactccagtgtggtaagggagtcaggaaagtagctgagatttcatagtttctttaaggagtttgaacctgtttaaatcaagtaggtatgaccctccccccccccccccactttatctgcttatattgtatatttatttatgacccacagtcctctgtcacctgtctcccatcagacctaccagtcccaggctaagggcacagtgaactgagctctaatgggcttcatcttttctggctttgtgcagaaaacaaggcacacaaccacagtggtgcagtcctgtagtccatggatccagagacgattctaactgctgcattcaaacaacgttaaatggctctctttattatggagttactttttgtttttcttcgtaaaaaaaaaaaaatgctaaaagaagtttgcctagtactgtagtttaaatgtcacaaagtcaaacttaattataatattaattttaatatcaacgtttgcttcccattctccgtagattggttggtttgttgaggccgggtttcacagtacatccttggttatcttggacttactctgtagaccaggctggtcttgaactcacagagatttgcttgtctctgccttctgaatactgggattaacaatgtgcctccatgcctcatcgttttcattccttggtaaacacacacacacacacacacacacacacacacacacacacacacacacaacaaatagaaatagtctttcccaggaaagaacacaccaattggttatctgatatgaaataagcaactctgaaaacatccatataagtaatacagaatgagcagggtatgtagaaacacacacacacacacacacacacacacacacacacacacacgtaaataacaacaattgatgaaaaaaagaggtcatatatttgaaagagagtaggggagggtttggtgggaggaaaggaaaggggaaaaagacataattataatatctcaagaccaaaataaacattttaacaattattgttttttaaactttatcttattctcctctgtcccagaagttacacggccacagggaggtgcctcctgaacctcattaagttttggaaacttcccacgagtcctacaattcatcccgagcattcaatttgctccagaatttctgggaggcggctattccagaaccagagacttgcagaatagactgttaggaccagttccctagaggttattagagaccgcttaatcatggtgagaaagcaggctggagaagggcgggcagggggccgcgggagggcatctgagatggggtctgcagcaaccctgctgcgtttttgtctggtgaatgcctgagccagaggccctgtcccttttaacgcccttcaaagctgacagtacctctcaggactctgagcgtgccacccactgtggcctctttagaagagaatagtctggagagcaggggcttaaggatggagctacaaagccccaagcagaagaagacgcactagtgaacctttgttgtggccatgttagtggagacagctcgttcctccttactactacaaggaagccctcaagtcctgcgcactctgggaggctgtagtgtggccccgcgctcttgggaagaggcggtccaggtgttccctacggtccctcactgcccccatttcttcctctccaaacctggagatgtcaccccgggaagtggggagggatccgaggctgaggtcagacttggtggggatggggatgagcacagagccgcagcctaaaggttggagggggtccggtggggtcctgggaaggggcaagtatagtggctagacagagggcggcagtctaggaacgagggaagtggtgaggccctgcggagaagtgagaggcttggtcttagggaagaaaagtggaaaagaaagtgtaaaggtggccagggagggtaggtttcagaagccgggagcagatctccgcgctgcgactcctacgcggtgccccaggctggtttcccctcccgccgcccctccccctcccgcccctggagctgcggagcggcgaccggagctcagggctggcaatggcgcgggcggcgggcgagcggggccgggctgcacggtgcgggcgctggcggcggggcgcgctcctcgccttcgccgcgtggaccgccggctgggtgctggcagctgcgctgctgctccgcgcacacccgagcgtcctctccgagcgctgcacggatgagaagagccggcgcatcctggctgcgctggtaggtcccgccgccgcattgcccagtgtcgcgcgtccaggtcgggttccagacaccttctccgggtcctcggagtccacgtcacctgcgatgctgcaacatcgtagcggccactccatcctgggatatgggaatggggtgggggtacccgccaaagggagattaggttcctatgcgcgtatgatatacccaggcaaagagctctctgttcgctatgggcgatcgggacatccctcctttttctccagaatatagtcttgcgtcccgggacagtattcatgccagaaagtttgcagggctattcctggtcagtgatgcttacatccagttctagtggccaggtttggaggatatacatctttcttacgctatctcgccccttaagccaccatccttcggtgatcccatgggactgccggaacaccccaacctgatcaaaccccattgtttgattgttgcttgggctcctcctcctgatgacctaaagacaaggcctttggctgttcgggtccagaggaaccgaggcagacacctcctaaggagcacaaggagccatggagccagcctggtcgaccctgttccatggtctaccgtggtccgctaaagagagaaaatcagaggattgtgtccgagctgctccttaacctggccgggctgttgtagatacaaagaaacatcactatcaggggactgctgaatggtcggagtggcctttcctctaagaagtaaaatgctctttttttattttttattttttttatttttttattttttatttttttggattctgcttagaaattcgtgcttaggagagacttgagtacaggcaggcatggccgacctctaaaaagtcggagaaagtagcctgtatttgctccccactgtgattattcgagtcctaaaatcttgagcatttggtttgaaacctccaagaaactcttgggggggaggggtttcagttcacttgctttaaaaggtttttttttcttttcttttcttttcttttcttttcttttcttttctttttgttttcagattgtgggaatttagaaatggatttagtattaagcattgagtattttaaaagtatttgtcttcccctcctgcttcttcatcacctctaccaccaccttctccttcctttttcctcctactccttccctccttcttccctctctccgttcctccctctctccccctgcccccctccctccctctttcaaaaagattgggaaacattaagccaccaaagcatgttttctaactaaatgttgctaccgtcaccgtgttaacttgcttcctccacagagtgacacacacgttctgtcttctgctcactgcttaactgaagtttcatcaaattttaaatcgcagggtttaaactctaacagcacttgctcttcttgcagatggggacattactttccccagtagccatctaaaaatccccaaaataaaattcccttttattttggtgaaggtcgctgactaagacaacaacatttagtagtttggctaagacccaggtcccacttacaaacttaatataatcttgtagattaaaataggaaacagagcccattatttatttatttacctttggtcatgctgagagaagcctaatggaaattaaattgcctgataggatttaagtaattggtagtcataactttccctgcattccaggctgtaaattaaaaccaattctgtttagaagctttaccaatacatcttcgatgcagccatatgggatcgtttttagtttgacagagagctgaaaagattgattctgtcttttacagctctcaatcctaactcttgccaaattcccaaagcctgtttcccaaagtttgtgtttgttgggagtgtcaggtgaaccgctgcgggtgggggttgggggggggcgctgtggatgctgtgtgtgaattgttcttcactcaggcaagcatctctcttcaccttctcactggcctttcctgatacgttcattctgcacttgctgaggcaaaactgagaaagtgccctgactcattgtacccaagaccttaaatcagggcagactgaaacgcagttccagccaggcagctgccaagcagaggctggcattgtggcttctgaagactggctctgaatcgcgcctctgtgtcctggcttccccggcactttgcattttgcctggctttcatcctacataataaaagcggttgttatttttctgactggcctccagactctcattagctttcactctgagtacccagtgcacataagaaattagagccaaagggaggttctctctggcagagccaagagtcctggtgagtctcccatgcgggcagttatgtgttcctaggccccggagtgtcaggtagctttgctggtagtggaggaaacttacctgcagaatatagcaaccaggtggtaaagagatggctagaggatggggtgaggtccaacatttgcagagacaagacttgcttagaaagtcagcttcacttgttttggaagcttcaatccctgggtcctttggattccccattttcctgctcttttgtgtgacttaccatctatacagcatccacagaaggggcacttctcctgggttgtctgtgaggttgctagagcctgatttctctggggagctaatgtgttgaggctctgctgggctgaggagtggttggggagcatcaacacagacaccccaacatccccagcttctgcaggcagatcaccatagctctgccagtgcctgttgatgcccacgctgcccagtagtacaggcagaagcacagagcgtgctatttcacttaaccttcacaacaaactctaacagcattggctgttcttgcagatgggaacatttaagcccattgtcctgcctaatgatgttaatgtgtcgaggattcaagagtctacttggtgccttggacaatagagaccctgagttgaaaacctccacactgcacaccctggacatcagcgtaggggactcctcatcctccacaacaatcgtcccataggttgtgatattcagaggcctttactgcctcggactagttaggtgctatggaattttgcactattgcctacattaaagattccgggttttttttttttttttttttgtctgattgtttttgtttttgttcttttggttttgtttttatttgttttgttttgtttttatttttatttttatttttatttttttgttttaaacagggcagactcctctctctgtctctgtctctgtctctgtctctgtctctgtctctctctgtgtgtgtcctgtgtgtgtgtcttaatagagatggcacaggccccagggagcccggcagcctgggcctctggtcttccgcacactggtagacgagcgtttgcatgatggggcgatgcttgctgagattctgccagacatcgagtggcttcctggagaaggactgttatcacatgcgcttgcttctgagtgagtgcacatgcttaagtgagtttctttcttagaccactgcaaagttatgttagccagcaggcttgggggcctttggccactccactttatatcctgccgtttttgatactaggcttcccagcaagaagccaaagtcctaatgcccagaaagagtttaggcttttacaaatgccaccccaagctcccccatctctcccccccacctactcctaggctgataccaacttagtagtgacaccattgttctaagcatttcctgactcctgtttggaaattgttctccaaatttgccaaggtgagtttcttgggtgtttcattggtgaaacagatgtgtatataaagcaatgtgttggtggacccaacgcagacaatgctcacatggctgtcaagtgggaagagagagagagggggggggagggagagagagagagagagagagagagagagagagagagagagagagagagagagagagaaatttgacaggttgggaagcatgtctgtgagatgggacaggagaatgactatttttggatgaggtttgtttgagatactgtttcattctatagaaaatctggtctcaaacttatggctgtcattctgccctgttttccccagtgctaggaccgtggtgtaaatcactgtgccaagcttgaaatagaagattttagactggtgtggcatgctacagagcacatatggagatcagagtgcaaccttgggtgttagtccttattttctacttggtttgaaaacaggtttgtttttgtttttgttgtttttttttttaaaccaccatgtataccagagagtctcctgttcctgcccccatcccccaatcttgccgcaggagcactgggaatacagacgagtgctaacacaccttcaggtcctcatagttgtgcaacaagatgtcacccactaagccatcatccaaggcctggaataatatttttgatagactactccagtctggcctcaggcccaggctttaactgctctccattctgaagtaccctctctgattctctggatacttgtgctttgtcagaatttgggcacagcttgctgtgacagagcaaccctctgcttcactgcccgacgatgaggctcccttcactttagcactgaggtcaaaccatgccctccattctcataaccaggtctggggagctggagaggggagcttacattgcgagggataccgtgctagggactgggataccgtgctagggactgtgcctctgactttgttggaccttgtggtgtctcctgtgacactggtctgtcctcctcctacatgcccagagacaaacctaggctgacccaaaattaaactgcgttgtgtggtggtcctgtccatactgtgctctggtattagccaggagcctgcaaagctgtcatttctcctgtgagctaagcctgggagcttcagtggggaggtggtctcctgactactcattcaaaaatgggttaatttgaaaagttgtcaatgttaatctgtttgtgtcaagatggggactaaacctcaggccctgttctagactgctctcgatgagattctctggctctggaatctgcaggtgtaacacatggttgtggcagtgacagtcaccatttagaggagaagagtcagctgccccctgctacacacttactttcgactcctaagcaaaagagaacagctctgtggctggctaggggcacagccagggcccagctttcgacctggtctccagggcctcttctctgggcttcatcgggggactggctcccttctctctgctttgcagcactgtgagattgtgcagttctgccttctcccccaccacatgggcactcactccttctttttcagttctgccccgcacctcgtgcaagagcattcccaattaaattactaatgcagtcacattagagaaatgattgtggaactgatccaaggcctttttggacatcactcagactctcttgtttaatttaaaagtatcttgaggaagttttattatagagatgtgaagctgtaaacacgagacaacatcggggaagcacagatgcagacaatgggtgacaggaatgaatgacacgtactgtcgtatgaccatatctccccactcactgcttgtcttagtacctactcttcccaggatgttccgggaaggcctctgagaagcctgactggctgttcgttatgtgctgtgggagcacatgcacacaggagcacataagcacatgaacaaagactgactgacactgccttcccacgctcacttcctgcccctgtgccttggaaaggggtctcagagctaaggtcaaaggacagcatttccgccaaattctgtgtagtcccaagtacacagcgcagcacaggagcacaacctcaagcaaggccatttaaagcaattttaccagaataggtttatacaatttccttatggttattgcttttctagacaaaaaaaaaaaaaaaaaaatccagcccaaggaggctaggaaaatgtctcagaaagtgtgatgttcttgttgtacaagcatggagacctgagcttcgattctcagtgaaagtcagtcatggtggtataacctgtaaccccagcagtggggtagggcagagacaggcagagcctggaatcactgaccagtgtagccaaaacagtgagtgcccagttcattgagtnnnnnnnnnnnnnnnnnnnnnnnnnnnnnnnnnnnnnnnnnnnnnnnnnnnnnnnnnnnnnnnnnnnnnnnnnnnnnnnnnnnnnnnnnnnnnnnnnnnnnnnnnnnnnnnnnnnnnnnnnnnnnnnnnnnnnnnnnnnnnnnnnnnnnnnnnnnnnnnnnnnnnnnnnnnnnnnnnnnnnnnnnnnnnnnnnnnnnnnnnnnnnnnnnnnnnnnnnnnnnnnnnnnnnnnnnnnnnnnnnnnnnnnnnnnnnnnnnnnnnnnnnnnnnnnnnnnnnnnnnnnnnnnnnnnnnnnnnnnnnnnnnnnnttcattgagtgtctgtctcaaaaaaaaataaggttaagcagcaatacatgaaagaaactcagttgaactctggcttccatatgcacagtcatacacacccactaccaccaccactacccccacccccaccaccatcaccaccactaccactactaccaccaccaccaccaccaccaccaccaccaccactaccaccaccaccaccatcaccaccaccaccaccaccaccaccatcaccatcaccaccactaccaccaccatcaccaccaccaccaccaccactaccaccaccaccaccaccactaccaccaccaccagcagcaacagcacatctctgggcttatagtgctattctctagatgggagatcaggcccaacacttcctttctattttaaccttttatttcatgtatagaggcttcagttgcatttatttatgtgcaccatgtgtgtgcctagagtctgagtcagaagtgggtgtcagaccttctcctggaatggagcaaatggctgtgaggtgccctgtgtgttctggaaactggactcagattctctgcaagagcaagaggatgggctgctgagccaccctgcctgctctgggtcccggctttctttctgcagagttttctgttatgagaagacttgtcacatggtgtttggctagtatgagcctcagtgtctgtgtttcacagagatctaaaggacatcataagaggagagacctgtcagcaggaagcgggaacggggtggtgggggaggggcagctcaggtcttgggactgctgggaagtcactgtcttaaagtggtcagatgctccaggcaccattttcaagcataggtgtgttctttgttaaccggctttttgaacactctgtcttcagtattcataaaagtccacaacttcttcttgactactttgtggtttggaatttttgcacggtatggaggtagtgtggtgtgtacattatattttgcatgtggggcagccccagccacggagcagataaggaattctgagatatacgcagtcagagtcaagcagcggctgtaaatgcccggtcgtctcggcctcgcttgacaccacatgtggccaaatgagtcatgaaagcttgtggcttccagtcagcttttgggtttgaaattatttgcgtgtaagcaccaggagtttgttttcttgactttaaggcacatcttataatcaactcagaaacaataaagctgactcatgtgaaactacccgcccgcctttgcaaagaacacgctggcatatctgatcgtggttcaaaggtcatcttgtttagcctggccctgggttatacctcccttgtgtgcatctcaccgggctgcactgtcactgtcactctgtaaggaaggcagagcagctaagatacagaggaggagaaggaggccctgaccaggtaggaagcacgctgggaatggcagcccagcagtcagacttcaggcttaaggctttccatccagtggtttgttcagtgcgccacactgcacagtgtccacaggtcatccaggccttttgcaatgagcaaaacagggtgaaaagacactgagattttattcctgtcttagaactgtgtaaggagtaaggtgagtggatgtaggttcatttgctgtagaagctttgggagaggacagcggcttgtatttactaatatggagggattcatttgtgcggccttagaaagtatgctcattttgtgatacacatgagtccagagatttaggcttcataaaaaatggtgaagcatatgccagcaagatttttgctgacagaaccctgatatagctgtctcttgtgaagctatgccagtgcctggcaaatacagaagtggatgctcacagtcatctattggatggaacacagggccctcaatgaaggagctagagaaagtacccaaggagctgaaggggtctgcaaccctataggaggaagaacaacatgaagtaaccagtacccccaaagctcttgtctctagctgcatatgtagcagaagatggcctagtcggccattactgggaagagaggccccttggtcttgcaaattttatatgccccagtacaggggaatgccagggccaggagtcgggagtgtatgggttggggacagggcggggggagggtataggggactttcacgatagcatttgaaatgtaaatgaagaaaatatctaataaaaaaaaaagaaaagaaaaatggtgaaaatagggctggagagatggctcagtggttaagagcactgactgctcttccagaggtcctgagttcaaatcccaacaaccacatggtggctcacaaccatctgtaatgggatctgatgccctcttctggtgtgtctgaagacagctacaatatatatatgtgtgtgtgtatatacatacacatatatgtatatgtatgtatatatatatgtgtatatatatatatatatatatatatatatatatatatatatagtgaaaattaagaacagaattgtgattcttcttccgttactccatgctccttcttccgactgtcagccagtagagtcttcctagggatctacagcatggtggggaaaggtctccagattcccccgccctctgagaggttctatcctggaatcacgtggtgtttagaagtgacaccccatcgaaggctactggggaaatcttcaccgctgctaccattgcagactgtctccacgcttccagagtgtcacgagacacggcaccctgtgccttacgtccactctgtgagcccggaggcatgctatctgacattctgagagcttcaggaacaaaagcacctcttattcgaagatagcaaacaccagtgtgtttggaagggacagtgccgtggtcacactgaggggcagatgagactccacggcctcatccaacctagctgttctggcatgggatgttaagagtctccggctaagcctccacagtggagtcagacggccgtggcctgcgtcggtgttctcatgtgcatccagcgccactgcagaagacgagctcttgacgctggatgtgtggttttgaaggccctgtcctcagctagactgagtgacataatcctgatgagactctcaccaaattaggcttggccctctgttcatgtaggggatccgttctggaacctccctgcaaaccaaacatcaacccaaggattttagtcccttctacggcagcctagtgtctgcatggtcaacacatttccctttgctttgattcacctctgcgtttcctttgatacctgctacaatggaagtacttgctatagtgtataatagaggagtgacggcgtgtgaagcagtcggtacctgttctgtgcagatgcaatatttaatcaatgtttccactaggcgttggctggggaactcacagaacaaggcaatcacctgaacccgcctcccgggtggcctccaacactctcatgggcattttctctcctcagctaattacaaagtcctttgccccctattcctgccctgcagtgaccctctgttccttttgttccagtgccaggactatcgccgtggctggctcacgggcgccctgtgcgaggacctgtgtgtgggcggggagctgctgtaccaacgctgcctgtattacgagcgtggtaagaaggtgctgcaggctcagtggcgtggccggaccgttgtcctcaaatccaagagggaggccttctccagcttcccgcccctcactctgctggaggaggaagcaggggcaggtgcccccggcatccctgaggctgagctgctcctgatggtggccggggaggtcaagaacacgctaggcttggagctgcccaacaacagcatagccccgctatggcctgccaggcagggccctggctggcggcaacagctggccagtgcgtggtcactgctccaacaggaggaatacgtatacttcagcctgcttccagatctgagccgccacatcctaccggtgctgggatcctgcggtcacttttatgcagtggagtacttggctgctggtagccctcaccacaaggctctcttcccactggatgatgctggccaagcacaggctattagccacattgccctcagcttcctggacatggtgagccatttcgacagtgacttttcccaccggctccacctctgtgatgtcaaacctgagaacttcgccatcaagagggactttacggtgagtggaagcaggctgccatgtttgtggtaagagaagagattctggtctgtgtaggaggaagtgaattcttggcctctggaaggaagcccatgcaactttgggcagccttgtggttcctggtgattcccgttccagaccacttccttgccaggttgacaaaagggtttaagaaaatgcatctccaacctcaagaggagaggtccagtccagtgaagaagcccacaggaggcagagacaggcagggggcggaggagacatctcacttccttgagggcagctatgaggtctagttagtgctgctacaggatctgtggtcttctgaggacagtcttcctgggctgcagatggtgtgctgttcttccaggccaggcattctgtgtccacagaaccagtgtgcagagaacagtcattgccagccgacattactcttctggagagattctagtcagtttcgtgtctgcacataagacattatgactcctgacgacatagtcacttgagatgggggttataatcactcgagtcttagggatgtggcagcgtggaatgctgtcctctgggcatgacgtagccattgtccccttgagctctcagcagctgtgattgcctgcatgagggacatcagggctatctgtgatccacagtggagggacagaggagctcatgagacagacactatctccaggagttggctcctccccgagggtgtactagtgacctccttaacattacagagcttgctagcaatgcaaattctaatttttgttacgtttacttatttattctgggtgtgtggggggcataaatatcacagcatatgcagggaggttggatgtcaatttgtgggagttggttctgtccttaataccatgtagtttggatacaggtcttcaggtttggtgacaagtgcccttacctggtcatccatcttaccagcccagcaatgtacatttccatactgcacctcagaccaactgacttctgtgtgctcacaaggacaaggcaccaactgtgagccaacccaannnnnnnnnnnnnnnnnnnnnnnnnnnnnnnnnnnnnnnnnnnnnnnnnnnnnnnnnnnnnnnnnnnnnnnnnnnnnnnnnnnnnnnnnnnnnnnnnnnnnnnnnnnnnnnnnnnnnnnnnnnnnnnnnnnnnnnnnnnnnnnnnnnnnnnnnnnnnnnnnnnnnnnnnnnnnnnnnnnnnnnnnnnnnnnnnnnnnnnnnnnnnnnnnnnnnnnnnnnnnnnnnnnnnnnnnnnnnnnnnnnnnnnnnnnnnnnnnnnnnnnnnnnnnnnnnnnnnnnnnnnnnnnnnnnnnnnnnnnnnnnnnnnnnnnnnnnnnnnnnnnnnnnnnnnnnnnnnnnnnnnnnnnnnnnnnnnnnnnnnnnnnnnnnnnnnnnnnnnnnnnnnnnnnnnnnnnnnnnnnnnnnnnnnnnnnnnnnnnnnnnnnnnnnnnnnnnnnnnnnnnnnnnnnnnnnnnnnnnnnnnnnnnnnnnnnnnnnnnnnnnnnnnnnnnnnnnnnnnnnnnnnnnnnnnnnnnnnnnnnnnnnnnnnnnnnnnnnnnnnnnnnnnnnnnnnnnnnnnnnnnnnnnnngaggaggaggagggtagtgtggggagaccttgaacaacgcactctgtggagaaaagaggattatttccagtctggtggccagaccaggttcgagcagcagacactacttaagccattttgtgcaggatgagtttcatgactctcctgatgctgagaagtcttgtgaaggtttccctgtttgttttgttgctgttcttattttaggcccacaggagctgtaatttattctaggctacgcagtataaattaaagatgaatctctcactgggagatgaaaggaagagtgtcatgaatggggctgaggaggaacacagaggctggagaaagtgccagaagtcagaaagaatggtccttgctctgataacaagttataaagacaggttcgttagcatagtctcattaattaaaaaaattagaaactattatatcattttgtgtgcatgggtgctttgcctgatgtatgtctatgtaccacttaaaatctgttttgttttttgtttttggcaaggggtttggggggaggttcaagatagaaatccctctgtagactaggctggctttgcctcccgagtgctggagttaaaggcacgtgccactaacacctggcttaaaatattttttgagttatttgttttattttatgtatatgagtgttttgcttgcatgcttgtatgtgaaccatgtgtgttcctggtgcccatagaggtcggaagaaagcatgagattccctggaaatgaagccatgcttggttgtgggtgctaggaaccaagcctggattctctgaaagagcaacaagtgctcttaactgctgagccatctctccagctcccagttctttttaaactttagtgttcttaaccaaggtaagtggcgagattagtttttgtttttggccaaataatgagacaggaaaggttggtagattattgaggcttgggatgtagctcagagatagattcctacctggcatgcgggaaaaccctggggtcaaccctcagcatttcaaaagggaaaaaaaaaatcagcaaaacactcacttttaattaggattgggggggggtgggtagctcagtggcagaatgcttaccaggcttctgcgatgcttctgggctccctgaaaatagcaagaaaaagaggggacatgttggtgtgtgtatgggaatgtaggaagaggacattttgatgagtgtgggaatataggaaggagacatgttggtgtgggagagatataggatgggagacatggtgtgtgtgaggatgtaggaagaggacttgttggtgtgtgggtggggggatgtaggaaggagacatgttggtgtgttggtggggggatgtaggaaggggacatgttggtgtgtgtgtgtgggatataggaagaggacttgttggtgtgtgggtgggggggatgtaggaaggagacatgttggtgtgttggtggggggatgtaggaaggggacatgttggtgtgtaagtggggggatgtaggaaggagacatgttggtgtgttggtgggaggatgtaggaaggggacatgttggtgtgtgggtggggggatgtaggaaggggacatgttggtgtgtgagtggggggatgtaggaaggggacatgttggtgtgtgggtggggggatgtaggaaggagacatgttggtgtgtgggggggttgtaggaagaggacatgttggtgtgtggggggaggaaatgtaggaagaggacatgttggtgtgtatggggggatgtaggaaaaggacacattggtgggtgtgacgtctggtgaatatgatgtcatcgcgtgtgtgggggacataggaagggagacttggggtagatatggtcaagatgcttggaacatatacatgacattgtcgatgactaaataaaaagatattatatatatatatatatatacatatatatatatatatacacacacacacatatatatatataaacaaaaaaaatgaaaaaatttaactccctcaaaacaaacaatggcctgtttgcctagattgagtttgttattaggcaaagatcatgaaagcgggaggggttctctgtactttactcttactattctgcaggttttaaaatagtttaagtcccttctgctgttttactgacaatccccaccaccctgagtacagagaagaaatcaaaggtagaaatgggaagcccttccttctgaaaccaaatgacagcagtgaatgaaccctctctgagatgctaccaggttgggggagggggagctgacattttcacagtggcctgtgagggcttgtgggaagccagttccatcaaagatgtcacattttgaaatgacttcttatctcaaagctatcagctgttggacttgggcagactccagattcttgcaaatttgagctcatttttttttttttttttttttttttggtatccaggtggtggaggaaaatctgcataatttataagttattctttttctggttttgaagcctgtttggttgaaagccagaaggataaatctgaaattccggcagtcctcaagttcttactctgacagtggaattagtggttgatgcccttggcgaagggcttatttatgctgatcctactccatggcccatctggtcggtgtgttgatgtgggtaccagatgtgccataaacagccgccgtgactgctcatagtcttggggctcaattatgtctctctcacagcatttgtaatcctcatcgggacatcagtgaggaaatgtgaaacttagcagagtcaaaatggaattctcacaacaaacataaacaatggggagggagggaaggtgctgtgcctgatgcctggtagtgagtgtcacatggactctgtcaaatctactggctttcacagaagccaccgcagcctccaacaaagacacttctttgaagatacaaggacgtccaccccattacatcaatccttggacagatgccataattgtcaatcattatgaccaaggactcttgtttcaaaacttctcgtgttcctctccttacttttatctcatgcattaggttgttcacactcgtgtgtgtgtgtgtgtgtgtgtaggccagtgccattcctcaggagccatacacctttaaattattgttattactactactactactactactactactactactactactacaattgttgtcaggatttcctcctagcctggacctcaccacatagattaggctggttaactttcaaactccagggatctattgcttttgcttccacagctctggaatttcatttcttttctcttttctctctttcttccctttttaaagatttatttattttacatactttatgtatgtgagtacactgtagctttgcagatgattgcgagtcttcatgtggttgttgggaattgaattttaggacctctgctcgctccggtcaactccactctctcactccctgcttgttcccgcccaaagatttatttactattatacacaagtacaatgtagctgtcttcagactcgccagaagagagtgtcagatctcattacgggtggttgtgagccaccatgtctttcttttcttttctctcttttcttttcttttcttttcttttcttttcttttcttttcttttcttttcttttcttttcttttcctttcctttcttttcttttcttttcttttcttttcttttctttttaatgtgggtttgggggattgaactcagatcttcaagcacactctagaaaccgagccatctcctctgctcccttatttttgcctttaaaaccttcccctgacttctaacaatggccctgttatttcacccacacctgcgtctcacagcggcactactttgctattcaattctctatgatcagtgttctctccgattacttctgttgcttctgttgacaaacatcacgacagtcaagaaagaaatggaaggcacaggctggagagatggctcagtggttacgagtgccagctgctcttctggagaacacaggtcgggtggctcacaaccacctgtaacccagccgcaggagatccaacagcctttttcagtctcacaagcatttgcacacatgcggcacacttgcatacaaacacacacatgtacataagtacacaaataaaagctaaccttaaaaaaagcaacagagaaattcattttaaggtcttttacatatttcgtttttaaagtccagaaaagacccaaagatgaaagtgatatggctggctacagtccccatccttgagttagggacaggaaagcattttatttttgtacagtaaaactttcggacataatctatgataatagcttgtgtcaaaggaagcacttgtaaatgccctgggggagcaaggtcatgagctgagcatttcctcctgagaggtggacttggtggtcacagccctgtggtgaccctttctccagtcacccataacctattgacatcaggacaggaaaaggagccgtaattgggttctcccgcagggcccatgctctgatttgatggcagtctctgccgttttgatttcaggtggtagctattgacgtagacatggccttttttgagcctaaaatgagggaaatccttgagcagaactgcacgggagatgaagattgcaatttcttcgattgtttctccaagtgtgatctccgagtgcacaagtgtggagcccagcgtgtcaacagcaacctgcaagtgagcagcctagacagctggggatggtgatgtttatatctgcacgcctctgggctcattgcatcctgagggcatgcacattttgtttcttactacctgggtggtggtggccgaaatggctcagtggggtctgatgggtggaggttccaacacagccccccagtgggcctatctctctttcctgaagctcctcctgaggctgcttctgagagtttgtttggagatcctagcagaggagtgcacttacttgcatgcccttggctctctccaggaggttggccacttagagcaggaagcaggaagcacccagaatgctgaaataggaaggagacacttgcctagccagcctgatcagccacactcaccttagtgacccacgaggaggcgtgtcctgggacaaactgtcctcatacctaaggagatccattcttcctgcaagtgtctgtctccctgtaaattctcacacagagagaaagaaagaggcctcaggctccttgccctaaagcctctcactactaattctgtcatccagctcacactcccagccatacctctttctagtccatctttccaaggagcttaccctagggtctgatgggactcctgagcagaactgaagcagataaagccaggtgctcaggaaaacacactgtggggttttcctgccatgaagcagagccccatgcaacagagctgtctatccatcgtgcgggtggctctagcccaggccaggcaacactggctctaccaccacagagtctgccgacttctgagtcaagtgccacggtcactgggtgtttcgtctttgagaaggctaatcaatgacacaggctttcggggtgcccgtgtcagccccctccatgtacctgtggttctgctgtccttacaccatacagacaagagttggtttttgtttttgtttttttttttgtttttgtttttgtacagagtccccatcatctttggtctcatccacaagtctttgcattagagaaactaaggactggcaaaaatggctctgtgggttaagtttctcaccaaattcaacaccttggttttgatttctagaactcacatacatagttgtaagaactggctcctgcaaattgtcttcttacctacacaaacatgcatgcacatacacttatacacatactacatgcacacgcacatacacacaaatacacacaggcacacacatatagacatcctacttgcacacacacaatacactcatatacacacacacatgcacacacatatacacatatacacgcatgcatacacatatacacacatgcacacacacacacacacacacacacacacacacacacagaactcttacagattaattgagaagcaagtggaaccttgagccaaagaaaactgtcaggagagggcaggggtaatgagacacagatgaaaaatccaaacggccgaaggatttaggaaattatctcatatctcatctcatcatttaaagacataattaaaatgatggtaattaaaattcaacaataatatgcttttgtcaattgggactagtcattaaaatgctattaagtaccatctgaagctctagggagctacataagtgtgtccaccttatggtgacattacgttgtggctctggagtggatgtgggcacacttatccctgtgcctgactacttgtctttgagtatagatccagaagtgaaagtaagctttctttgggatgtagcataaagcactaaatagaaaaaggtcagcatgtgtaacatgatctctgacagatgcccttttcgtgtcagagttcagttgctgtgacaaaacaccggatgcaaacagcttataatgagggaagtttgaggtcagtctatggtcagcctgatgctttgctttgggctcagtggtggagcacagcatcctggctggggtgaatggcaaagaagagctgctttcctcttggtggcagggacgcaaagagggagaagagacctccatcctttgcaaggcacacatcaatgacctaactcactcacaccttttaacagctccaccacatcctaatagcatcaaccaaggagtatacatggctccagctgcatatgtagcagaggatggccttgtcaggcatcaatgggaggaaaggtccttggtcctatgaaggcttgatagatgacccagtgtaggggaattgagggtggggaggtaggagtgggtgagtgggtggaggaacaccctcatagaagcagagggagggaggatatgatagggggtgtctgggagggagaactaggaaagggaataacatttgaaatgtaaataaagaaagtatcaaaaagaaaaaaaaaaaagaatgaattgctcccctgaattaacctctcactcctccccacctcctccaggtcatctgtgataaaatattccgacactggttctcctcaacacacaggagcccggctgtctccctccagcttcggctgcagctacagcaggccgtgcaggagtgtgctcagcacgggggctcctcggggaattcctggacagcctcatccagtgtgttctggaagcttcgatggctcttgcaggccactctgaaagaactgcaggaggcggagaagtagcctctctcttgcctttgccatcaagagtagacagaggaagcgaccttcaagggactcctcctgtagttgctatgcaaatgagctgtcagagcccgtggcatgctcttctgaagtgtgcagctgagctccccttctgtggctgtgacgtggacctctcttgctcctgcccagctcggttcgatctggtttcgtggcgacctccggtctgtcactccttccgcagtgaccgaagggaggagtttcaccagagttgccagtctggaaccctctgaggactgtacacagaccttgccactatagacaagaggctgctgctcttccttgttagctgctaacaagctaaagcgtggctgtgggcatactgatggatatgtttgcaaataattgtgtgcataatgttgcacccatgagtgtatgagtgggtttgtatatatgaatgtgtattgtatacacatgagtatgttgtgtgtaaataagcatgggattgtgtgtatgtaagtgggattgcacatgttctcataattatgagtgttcctgtgcacgcaagtgtgtgtgtgtgtgtgtgtgtgtgtgtgtgtgtgtgtgcacattcgcatgcccatgacccagtcatcgtgcctgtgaatctgtgctcatggatgaatccatgtgaatccacccagaagtgcatgcatgtgtacatccagaagtgagtaagtgggtgggcactcggagcctgtatggagaggtggcttttcagtgtgtccctaggaatcttgcctagctggcaaagaagtgctatttttcccccctggaattaaatgcaataaaatgtgtgtccttagcggcacaatttgctttggggagtatgtggaaaggcagcttttagtgcttcccattctgtggaattctagggagcactttaccatgcatcgaccgcagcgcatctttcttctgagctggaccaggtgtctgcggaatgcagtgtgtcttgcagcgacagagacagtttatgtaaagtgctggggtggcctctgaccacaggcagaactgaggaagagcttgtctgtgcgtaccgactgaagacccagccgagggcagcggacacttcttgtggacatttgatgatgctcttttccaatggccagctcgcacgaagccagccaagctgtgcattgctccccaacagagagtggaaccagcaagccttatgcttaccatcttgcttctactcagaacagggaccccaaactctacaagtcacagggaaggggactcaagaacagtaggatgtctcgaagattgggaaggtgtgctaggggcttattaggagaaaaggacaaaatttggagttttaaacatgtacagaatgacagagcctcaccttttctcttcatataagacctttgcagtccagagaactgcctctttaactcctgtggatgcagttctcagggctgtgcacacagatgacatcctccctactctgagcagtggcactaggggatggaggcgggtcggaggtcacaccagtcctgaagctgtctatgatcctgaaggcaggagatgtctgtttcctgccgcccccatcccctcagcccacctaccagcaatttgccagagaaggctgactttcttaaaggctatcatctatcctgtgctggaagacttgctttttgtttctgtcctttgatgggagcctgcgcaggtcactctgccagaagtgagcaaaagcccacgtaggtgcccaggtctaggctagcagggagatagcctagaaggtagggagaaagctctgggattcctatgaggcttagcaacttttctgtctctgcacggggagtcaaatgactccttagtagccctctggctactgaccagccgctgttagtttttattcgattctaaatggaaacaaatgttttgtttaccatggagactgtgcaatatatgatcaccccacacaatagcatccctttctgcatgtttttggctacacacacacacacacacacacacacacacacacacagactccttgcctaaggatctattttaaggcagtggttcttaaattgtggtgaaattcactttttaaaaatgtttaaacctttttcaaaatactgcttttatataatataataaacagacatgatggtattatcagtatttaggcttttggcttttgtttttgatgcttggggctgagtacagagccttgagcgagctagccttgtgcaagctagcccagcaccataccctgagctatgaacccagccccatattatttttttttccaagaaaaggtctccctgtgtagctctggctgttctggaacttgctctgtagaccaggctggcctcaaactcactgcctctgcctcctgagtgctgggattaaaggtatgcaccactaccacctggccatatttaatatttttaatatgacaaccgagaatggtcattgctgacccagctgagcaatagccatactcatgaggataaaaggggttttaataacactcacaacagacaaaccattaacttcaagagttttatcctaattaaaactggcttttttccttttcttttctttttaatcagggtagagcaagaacatagtccctcactatcacaaattatgcagtttcctgcatttggggaaatcataggggtcagcacatccagactgcaatgggtaaggctcgccctgggaaaacttccttcatgaccatgatatctcctcttctaaaattggcttggtttactgtgaatctttttgtcacaaaccaattttcaaagtttatcctggttagcattaacacgatctttcgaagaaaggattctggactcacatgcctgttgacttatggaggacacatatgaacaggtttcctgttcccttgcacaaatctcacaggccacttgagttccgggatacccgagctggtcattgagtgggcatcttgcccatatcctataacagtatacaaacactgctgatacagacgaactctggtaaattgaagcaccaacggttctcaggcaggcctcctcttagatgtccagcaggcttgccccctgagaggcctactgtgtgctcactcccttgctcgtcctcttggaggatccagaatgcacagttaggacattactgcaggtgttggaagggggactattttaccactgtatcaggaggctcttcctagaacagctggaggtggcagcgtttggctcaaatgttctaaaaccaacatataaggaaactcatattgtcctgacaaatgctactctggctctgagatctgtgaaattcgtgtgagaaaggtaccttggaaagaatatgcatctccatagtacacacagacacacagacacacagacagaggttctccttacaactggctttcctttctggatgtttggagaggcagtctgtgccagtaacggaggctgatggaaccggtagtgattttcatttgaaaaacacatctctcaggtgggcatggtggtgcacacctgtgatcttattgcttaggaagaagaggtaggaagattgaacatttgaggtcagcctgagctacacggtgagtgcaaagccagtttgagctacacagcaagttctaagccaccctgcgctgtacagtgagtccagaatagcgagatacataatcgaatggtgtcctaacaaacacacaaaaccaaaaaccaaaacaaaccaaaaatccctctggaggttctctgccggtgagggaatgaagatgcctttgttgcagccatgtgtccttctccttggtttcctatgcctgggctgcactcatctcccaccaggctatcgttccttcagcgagactaattacctgtgatggctcttcttggctgtcaaccgaatacatctggaattaacgaattcatctctcggatttcttcactgtgggtggagttattttttggctgcgaggtaattttcttgattaaatcatttaaagtgggaagactgacctttaatccagatcctctgagctgggaagatccacctttaatctggaccccacttgctggcagccaatatagaggacagggaagagggaagcttctgctcgcggcctgcttgcccttggtctcactggcaagtccgtccctccactggcatttgagctgacttctttgggattctggcagatactgaagaccagctgagacatccagccttgtggactcaacaactactggactcttggattttcctttgagggacaaccatcgttggactagctggatcatggcctgtaagccagtctagtaaatctcgtatatatgcatatatataatatatgtatagattatataaatatatgcactcatataaatatgtatatacacacatgtaaatatgcgtatattatacatgcatgtaaacatgtatatatgtacatacatatatagatagatacatgcatataatattcattctattagttctgttcttctagagaaccgcactaatacaccacccatgaggatgacctggtgaaccttgctctggtgcttggtggtgatgtctctcagcagaatgacaaacgccagttagaaggttctcctcctaggttccccaccctagcccatgtgacctcagggttgggcccttgatttctacaggatggctcattttgtccactcttggctctggtctcagctgtactttgtgttggagttttccttgataaagaggcaccagagagcctgtgcagctatggttgctgtttgcaatgcagacctcttcctgccagcagcatccagcactcctggaggctgcacactctgaggtcactgtgtgggtcacagccatcctcttcctcaggatgcccagcatacaggtattggtaccacttcctctgggaagacttacccttctcatcacaatgattaaaagtgttgctttttctcacatccttaccaacgctggcaatttatatatgtatgcttacaaattattagttgatcattgttatcttctggataggaaagccagcctctagtctccagatttccttttgtacagtactggcaagactgagacttcataatggctacatgtcatttctttggttaatatacttagccttttttttttttggagttgtcttattatgtgtgtgtgtttgtgtgtgtgtgtgtgtttatgtgtgctcatgcataagtatacggaggccagaggttgacactaggtatcagtatttattgcttttctattttcctgagaggttaaaatgtattgatttctatgacatccaactgacttctcagaccaaaagaggatttggtttttaccatctcaattgcttcttcacattgttttttttttttttttgaggcagggtctgtcactgagtctgaacacactgattcaggcagactggctgactagcgagcttcagggttccatgtccctctccctcttccttagcactggagttacaagcgtgtgcggccatgcaaggcttgtgcatggctgctagcagtggaattcaggtcctaaggctcactcagcaatcggtctatcagcggagtcatcttcacagccatcatggggtccatgaaacaggagtctagcgtggatatggctcacgttttcttgcacttcgccttccgagtaacttctgaccatctcttgtcagcaaggaagaggaggtgaatgaagtggctaagaagtaagtgccttttgtttcctcggtttagcgaatgttgaccacctgcccaaccagaagatgatgctgtgtcactcagcttccagtccttgtgacaagagctctcaagggacagaaaggcttgtgttggcttcttgcctggaggttttaattaatccatgcttggtgggcgtggttgcctgtgttgtggagggagcagaaggcagaggaaagctgcatgagggctaggaagtgggagagatggaaggttcccatgtatctgtcaagggtgtgtgctcggtgacctttctccataactagtaccacctgtggctggcatttccgacccctcccaggagcatagtcagctgagaatcaagcctttagcccatgagctttgaggggactttacagatctgagccacgaaaagtagctttgatggcttccttttgaaatgctgtactaaaggtctgtctgcctcccaggctgtgtccttgctttgcacgtctggttttcagttttgggtaagtaaacaagcccctgaacaactgttctacctttcggacttacagcccacctggaagacactttatagctgatgccaaggtcctgctccctgtacttttcagggtgagtgtttcttactctctaacaattgctgaagctgagcttcattagatatgctacagaagagctggtgagactgctcagctggtaaaggcacatgcgaccaagcctgcctacaggttttgatccctggaacacctgagaactcacttttgatgtgcaaacccatccaaacgacaagctccttaggaacaacctgaagatggggttgaggtagctctcctgaaaagtctctctgtgtgagtgttactttgtttcttttgttgttcttgtttatttggtcggtgggttttgtaagactttgatgagctggagatccatgcaaaagcaagaggaatttatttttccagcatgctggggttgctcatcctgcacccaaaggagaggcagcaactctgggcggccagttcagcgagtttttatacagttttcaggggcagaatagagcatcagcaactaggcacaatatgattggtggaacagtgcaccctttaaactgattagtcttcagggaatgaggttttaggggcttaattagcctcttccttccagcctatgtactctgacctgtctcatccaggagggggaagggtgcctggtggagttttccaacagttctgagctgaccttttcagtttcacatccagaaataagactatccatcttgcgtttcccatgaaaattgtagtttccaaaggctgtattataactcataaaaatgatcttataggccctggagagatggcttagcattttagaccacttgctgcttccacagaggatctgggttaagtcccctgcacccacatggttgctcaaaactgcctataactccagttccaggtagatatgatattctcttctggagattccatggtccctggaaaccacatggtgcacctacatacatgcaggcaaacaatatacataaaataaaaacaaaatagttttaaaaatatcctgtacaggtactttacattttgtgtgtgtgtgtgtgtgtgtgtgtgtgtgtgtgtgatagcacacatgtagtggtaacttaacatatgagaatatgacttgcggaggtcctttctcctttcagcatgggttccagcaatcataggcaggtaggcagggttggcagtgtcaggtccaaaggaaactccatttccacaaattctgggagctaaacaaaagccagcattctcaggaatttgtgaagccagatctccctaccaaaggaaccatgcctattatcgctggcagaagggacaaatgactaactgtggtttctattagaatatcaaagctcacgctagcctccaggctccctcagtacctgttacctatttcggagtccatgctggcatcttggctcttttcatttttccttgccttctcgctgaccctaaacttcctccagcccaggagctcccctcccaccggctttccattctcctcatcaccctgctatttccatcatgtggctctcctctcttcctctcttggccctcaccttgtcttcatctcacactgccccttgcacctcactgcctctgctctgctcctgcttactctcctggccaggcccagtctgctgccatagtcagtgtactgttttcttgtagaaatatttaatcccaatacagggtttctaacctacctttgaccatttagttcctggataaaacacacacacacacacacacacacacacacacacacacacacacacaatctttatatttattataagctttaatcagcaaaagagctgggcagaaatctatccttcatatgattctgtctctttcccagccaataatcccattatgtaatttgccatgcttcatctagtctgctgttaactacaattagccaacccatatggccattattttaagattcttagtccatggcggtttctcctttattcactttcttctcctcacctaatggttctcctctgaccccaagcctggagactctaaaccctgcctgtgtctcctcttcccagctattggctgttggcatctttatttaccagtcagggataacttggtgggcaaggtcacatagcatcacctgggtctaagtgagggctctggaacaaccagtgttcagtatctcaaaataccaaacgttaacattttccctttctgctctggactcttccaagatgcctctggctgttctttccctctacaataaatctacaataaaaacctttaattgtgccattaatcccagcattcaggaagcagaggccggtggatctctgagtttaaggtcagcctgctctacagagcaagttcctggacagccaaggttacacagagaaaaacaaacaaaaaaccccaagccccccaaacaaaaccaacaccaaaaccaaaccaaacccaagacaacaacaacaaaagcaaaacaaaacaaaaaaccaaatcaactttccttcaattatgccttggaatggtcctgtttgttgcaggatatttgatcacattgtgacccctgagattgtgttctttactaggaaaacctgtttctagttgtggtgtggctcagacttagcatgcacctttaatccctctggctggaatataggcatgcccttagtactcacctttaatcccaaacatcaaaggtaaagttggtttgtagaaggaaacacccaagtttgaaggtgatgtctatttgaatagcagaaaaggtgatgggtcagagacagatttgacagaataagacatgcccaactcccactggaacagagagaacagtgcagaggacaggggcagttttcctgggagaatcttacagagacaggttgaagagagaataagctggacacaggtgaagacagaatgagccagagaatgagaaggagccgaaagattagaatagattgccagagttagtttgaggccaagcaaaccaattcagtcagaggctgagagagaaaccagattgaattggtcaagtgggagaggagtttgagccagaacagctgagctgaccagccagctagagttcagaaagctctagaaagggtgagcttatttagcagtaagtctagaaggctgaaaacattctaggcctagattagattgtatggaggctagaagcttccaggactaagcctagattagcaggctgaggcagtatgcctcaagagacaattatattaggtgcataaagacccaatcacacgtgttaacagtttatacagctagtgagtaagtgattttaccagttgagtcatcttgccaacttttctgtggcatagctaatgaagctcagcttcagaaatgtgttagagagtagacactccccatgagaagtacaggggggcaggaccagtgccaatgcaaataaaaatttatgtaaagaaccatgaaaccacttctgcattatttattatttattcattttggtgactgaattgcttggttcttgaatgtgaactttttacgtgacaatgttgtgtcacagggacaaaaggctgggcactgttacaggccacatagaaccctagtacctcttaagtcgtcacacgtaacaccacatctccataaaactgcagggcccttctggtagcttcagtccctcctcttgctgtgcctctgctctggcactgctgaggatgctggcatttccatctgaccctcaggcagcactggcagaagctcagaaccctgtgcttcctcctgtttctctgtctctgaggggtgtctgtggggactctgctccagccatcggtcagagacttgaatattttgctagagcagggacacagtttcctctccttaaagccacatttgccaggtggtgagctcaacccttgacagatcatctaggaatatggagtctgcacttacagcccagcctcagactcccaggccttccttgggctcttccagcattctgagtcctcctgtggtgccgttcccttctctttaatcaaccccctttcattctgtctagtgtcctggcatctctttgaaggtgaaaccagagtgaacagtgtaataagaggttgcataattttgagaaagctgcaccattttttaaaattggcgcttttgatcactgcccctgattattgtaaacatcccttctgctgaattgtaagcttggctgttttattttttcctctctctcttaaaacagttgctggaatcatctgcaggccaattctgctccaaatcttaattattccaggtgtcttggtaagggtttactgctgtgaacagacaccctgtccaaagcaactcttataaggacaacatttaatgggggctggtttacaggttcagaggttcagtccattatcctcaagactgggagcatggcagcatccaggcagacatggtgctggagaaggagctgagaattctacatcttgatccaaaggtagtcaagacaagactggatcacactggccagacttaagcatataaatgagacctcaaaaccctatctccacagtgacacacaatgacacattttcctctaacttcctctacacctcctccaataaggccacacctcctaatagtgccacttctcaggagcctaactaccacaccagtcatgaagtaacaccagaaccctcacctagccaccaggtgacttgcatggacagtaggaggtgaacttctcactgtggctctccacgggagacaagtgaacagtgccctgggaacagtattccttcctgcaacaaccgtggtggtttgattgacaattcccctcataggctcacatatttgcatgctagtccttagctgatgaactgtttggaccgattaggaagagtggctttgttggagtaggtttgtccttggtggaggaggtgtgtccctgggtgtgggtgtaggtttcaagaacccacaccagatccaatgtctctctttgcctgctgcctgtgggccaggacataaagtctccagctattgctctggtaccatggctgtctgctttctgccatggcgataatggactagccctttgaatatgtaagccagccccattaaatgctttctttaagcaatgtcttagtcatggtgtctcttcatagcagtagcccagaaactaaggtacaccctctgtccccacatcctgcaggctcccaggccttcagagtttcccttctgtggagtattatgggctgggagttccatcctcagattcaagttccaggaaggccatcaagagagtgtgtagatgcagcctatgacagactgcgctctgagtttctgtgggacacatgagggtttattgcctctgagggttttgtataagaggctaatttttacagcaatagttgagatgaaaaggaaaagtaaggatttcagcttgcacttgaagaatgaaccccaaagcccatgtttccttgtcttggtggcagaggagacatgatacaaagtctctgccacttcaccaaaggactgtggtagcagggagcttcctggagactgtaaggctgccatctcccagtagggagacttactcagtgagaactcgatgccatcataaccacggcataaaccatgtctatgatctggggcagcaatggcactgacatgctgggtgtggaggctcacgcctctaagcctagcatttgggagagggaggcaggaggatttgaggatagactagatatactagatagcgaatcacaggctggtctgtgctgtagagcaaggctgtgtcaacaaagcaaagcaaaataaaaacaaaatataatagaaggtgctatacatgcacacacatgcacacacacacacacacttctcattgactgtttgaaacaatattaggtcaaatgtctagacatttggcctaattaggtcacttgtatcccatctaaacagaccctgtctcatattgcttgagggcccagcatgggcctggcatgtgagtatgtcacaggcaccctgccattgtgaattagttctgtacaggagagattattgacttacatcggcctccaagggcattccctttgtttgaagtcactagctctgacagagttgtccctacccactctgccttgtagctttctgaggttgaggtactattctagagatggttcaatgttaaaaagctcttaaagatgcaacccaccccaccccactccacagaccaccactatcaggctcctttcaaattctgaggagggggtgcagaactgagtgaatgattgataggaacacagccatatctgagaccccccccccatgttagtaggaacacagccaagtctaagacccccatgccaagggcttaagtctaagggaatgtcaaagccatcctctgacccaggtaaataagtgatcagtgtgtgcaaaacctagcaaccacagcttcctcctcccagaagactacaacctgagactgcccctgcctccacgtgagacctcctaccacaccagcaagacctgcttcctgttctattgatacaacaaacctacctccttgcctgagtttgtgggttgccattggtggtgatatgtctctatcagagtgcacagcccacagaatctcagcttttccatagatgtatccttttgttgttcccttgtcaccctgtcaggtgactccctccaccatccaggtctcagtgaaagatagtgagtctgcctggtactttcctctgattttataattctccagggggcaatcctatagtttgaaaaactgcactgactggaaaccagttttggttctgtgtcctgaaccagagaagctgggtttctaggttgctccttcacactctttggatgctctaactacccagctcctcctgctaccttcatcttcagcagcctgtgcctctgctacttcaggtgacagaagaggttgccatacaaacatgcacctgtcccagcttccaggcaccatgcttagggtatagacaccatgtgtagggtatagaccagtcatctcacagcttagaccaggagctcagagcatggagccaggacctcagatagagtctgcctgggtaccagagagcatggttccaggggagtccataggaaaagggaagttgtaaagcttccatcattcaagcagggtatggaggatgtccttggagagggcagggcatgtaggacgactggtttagactgaagactagccagggtgtaaacaatgggaggagactcagggtgcctgatggagactccactctgggtaccactgcccattgctcttaagatcttcatgtaggaactgagcaaccaggagctgatgctgcacatgggtgaagccctgcctaagcaggggagtgatcatcttggaaagaaacactaaggaacaccaaccctccctctagttcttaggtgaggaacgttataaatgtttagaacaagagagacttggactttcaaggcacgagggagaaaggcaatggggcaaagctattcataaaaagttgaactcttgcctgccttgtaagagctgtgtatgagcttcagttcacatttggtgtctcgggaaccccgggagatggagcacattgcaaaagcaacatctcccctaagcagtttggagcctggaaacaatcacaatgttttctttctttctttctttctttttttttttacagtactgtaatttatgcagccccctgagggcgcattgccaaatttaattcctgaatagtataatgatgaaccacttcttgagtgcagaactttggactgtctggggatatttacaactaagagaaagtgcatcccaggctgggcaaactcaccagctttcctggctctgagggggaggacttctcactgcagggccaggcaccaggaggcagataataaaaccaagaataatttacagtgaattagcaggaagggatacacggtaaggcatgccgggtaccctgggaagagacagagtaggagaaataggtggatgttggccaggaagcagtacagcctgcggagatgtggaagaggaggatgtcagacagcaaggaaaggcagtgaggctggtcctttatgagagggatgcgggaggagatggatgcaaccagcaaggagctgagagaataatgaggaacctcacggggttctgctggggactgagcttttatgaaacaccagcaggtcgtgtttaacagagctggaggcaccaggaagacagcatggggctctgatggaacttccaagtatgttcagtgaacagacagcttctggacagaatctactgacaggccaatggtggacggacagaagtcccaagctttccaggcaccagacactgaaggatggggctgcccttcctgaagatgtggactttgagtggagcagcagctcgttaagtcttcagcaaacagtgaggctggctgtccacacccaagcatggcatccaggttcctggaaaggggcacggagatgtgaactctgagggtctatgctggaactaaagccgtgactttgtggcctcgttctcagtttcccagggagacctattttgaactgtcccatttaataagattatgggacaagtccttgggaaaacaaaattctagtctataaaaatcgaggttatttttgctctagtcatcagcgagggggaagccaagaactctgtcctccatccgagtgagcacctaacctgtgtttcctgtgagacgtctcacacaaggctttacacaagtgacccttcagaaacaaagcctttatggcacgctaggctcacagtggaagaaaccctcatattttaaccaggtgcttgttctctgtctggtataaaatttgaggtactgctcacccaacttacccaaatattttgtgtcgctggacttcgatatttcccttctgctgtcatttttaaattacattaaatagtttttcttttctttttaaagaagactaatttgtttatgtgttctatgtgtgtgcctgggtgtatgtatgtgaatcacatgtgtgctgtgctcccagaggccagagaagagcacgaggatgggtagaacaggaggtgtaggcagctgtgtacatgcgggtgtgcagcactgagcctgggtcctttgctggagcagcaagtgttcttaacagccgagccagctctcatgtccctgctacgcagttttatcttcaattctttttctctgaggggaggaaaactgggtaacaaagaggagtgaagcttggagtcagtgagaactcagtgggtctgagaactagccactatgtctaatgacctgcattcagtccccaggacccatactgtgaaagcagaaaactgactatcatgaggtgtcttccaactaccctcccaccccccaccccctgccatacacacacactgtggcaaacctagagctacatatacaccatattacacacgaatccatctgctctcatataccatagtctccagaataaataaatcaatgcaattttaaaacagagattaatagggctgtgtcttaactatgagctaagtgtaagtagaaacatatgacgtggcttttaacatcccttcctccctcttcacagatggagcaggtctgtggctagtggtcgccattacagagagattgatcatgaacgtggggtttctgaagctgcgttctcaggcttttaagatacaggtggagagtgctggtcagtcaaagaaagccaagtgtggactttctgatggtcgatcgctgaggtcaccggtggggtcttggctgcttgattttgatttatcggcccgaggaccctggagacagcatgttggtttctgaactgtgaggacagctgcagtcacagggtgacctctacactttctgtactgaggagaggtgtaagcgtcatgtccttccacatccagcctgagctgctctgatggatgtgtgctggagcacatctgtgtcctggctctaccttttgttcttggatccatcttctgccgtgttctcaaaccttcccagggctgtatgtaagctccttgccaggggccaaatgggagggactagggaggacaggaagtaccagatggtgacttggaatgttcgaattggggtggggcacagagaagcttccacttgaggtccgggtgtgattttcaggtcgttggccagaacctccctctgctgctcctcagggtccagataagtccataataaatcctaatgtggattttccttggaacacacaggtctgggatggctaatgaagttgtcagtgcagccatctcccctgctagaagaacagctggatgggaagaggaaagctggagacagggaagtcgtgggtgcttgctttgagaaaatgacaagagtctgtcagcattggagagagtaaccattacttcctcatcctttgtacccacccatctattcttcatctttctctatctacctatctatttttgtatgtatgtatgtatgtgtgtatgtatgtatgtatgtatgtatctatctatctatctatctatctatctatctatcatctatctctatcttcatctatcaatctatccttatcctctatttatatctataatctatctacatctctctatcatctataacctcatctatcaatcatctatctatctattatttatcacctatctaccctctatcacccttccatctctccttcctatggtagttccttgaaaaaaaaatcttatgttggagttactttattttgaaatatgaaatgagatgcaactgttctttttaaattgattactagtgtatagggaagcacacacatttcagtgtgtatatgtgggaagccacatgtgccgttgcagagtggcactgactactgctggccaccacgcataagtttggacaaacaaccaatgtgtacatatgcagtaaagttttttgcaaagacactgcctggcccgggcatgatagtgagggtttgagagtataaccaatcagatgtgagacatgcaaatgaggtatgataatgaggctctgtgaggtacagagagagagagagtagccaatcagatgaggaacatgcaaatgaggcttagtgcataaccaatccgggtgtgagacacgcctctcctaggcctatataagcagcaccagttctgggctgggggtctcttcgcctctgcaatcaagctctcccaataaacgtgtgcagaaggatcctgttgcagcgtcgttcttgctggtcgagtcgggcgcgtgcgcaagatgtatatatgtgtgtttagggatcagaggacaattttacagagtcagttctggagatcagactcaatcaggcatgggtagtaaacacttttacctgctgatgcaactcagcatgtagtatatgaaactgtttttgagatataacattcaaagagacgcttacagtaccaggggtgtccaaccctttgacactgtgacccgatattatgttttacaaatgtgttcagcttcatttacaggtatgctggaaagcacgaggctgtggctgcaagttgaacatgcctaggtagactctaacatggagtaacacataaactggaatgggtgtctcagctgggtgcagggtcttcagtaggcattggagaaatcaacgtgcagatggctgggtgagacagtgctggactgtgacagtggagggcagagactagaggagatattcttgagcaagtcaggcttcactcttaggtggccactccagtgcctcggtcccaagagaaagcaggtaactcagtctcccaggcctgtggaagtggttagtatacatctttagctgcatcttggttaaatacatctgtattctcagaaatgaacccatgcttactccttgctggcatgatttaaaatgctttagcatgcttttggaggagaaatgctacggccaggatgaaacagtgctatggcccctgtgaagacagtcaaggtctcgggaacttgggaaattaggatttgtttacatccctggaggctgaattgactctgatgcttctctctaagggggggacttggggatgtgtgagtcgggggcaggcagaaaggtgaaagtgtgtctgtgagtgcatgtgtgactgtatcagagtgattgtgagtgtgtgtgtgtgtgtgtgtgttagagagcatgtatatgaatttggggatgctgtttgagattgtttgtgtgcgtgtataaatatgtaaagtgtcaaagttcaggtggttttgagtgtatggtcatatatgaaataatgagagtgtgcttgtgtacatctgtgtgtgtgtgtgtgtgtgtgtgtgagtgtgtgtgtgagtgtgcatgttctaccagtcagtgccagctggatgtctgagtggaaagcaacaccagggagagagaaagagtctgacggatgtagggagagatcacacagcctatatcactctggcaccaaggtgtatattcaaaaggggactccagcagcaagaagatgtaggaaacacctgatggtcgccagatggaagtgagtgataccattaaggtcttggccttttttttctgttgcctcctggctctgtggaggtagctctgaaagtcactgcaccctgtttgcactaaaaatacctgtttgctcttctaacctattaggaaaacctattgcatctgctggtggtgtggaggttcacaggctatggtcacaagtccctacagttctctgctaagggggtccctaaaactagggaggggtgctaatgtgaggtgagaggagcaccagtggaggactccggagcagaacccacctaagatttccttggtcaacaaagtgggatcccagcaagttaatttagcaactgtgaattgcttctaaattgctgagatggacagtgatgttgtcaatttgcaatcagtgggagggaaatgaggggttgatacacatcgggcagaggaggcaatgttcttgccaaaaaggcttcctttgttgctggtgaagcaataatggcattcacagtcaatgggacagctgtggggcatcagtggaaaggggcacttccttccccttgaagcatctgcggtctctacacacaaacctgacagaggggaaaatgactagttttatatctgcgtgtcgcagtcctactggctcctgattccttgtacagaaatcatatgccaagtcattattaattgcacagtgccaggttgagagggagtattgatctgaagaaagctcttttctcaattgctgctagcttttgaaattgaaattgacatcagccctttgagtttctagcaagaaacaaatgggaatcaatacaaaggaggtttattgatgattaaacaaagaaattagttggaaaaaacacaaaataaaaatggacacccacagagtggacaagtaccccatggcagcattgagccctttcatacaagatggcatgcctttcccaatcacccaagtgctagcaccacggtcggaaactctgatctgagacctcatactcagttgcactatctcaagtggagttactgcatgtgaagaatttgcctcccttctataatcttcaaggccaaagggttcctgaaatgtggagggctaactgtagtatcttagctaggtttctattgcatgagaaagcactgaccaaacagacttggggaggaataggtctatttacagttcacagtccataacaaaaagaagccatggaactcaaggcagaaatctggaggcaggaactgaagcaggggccacggaggaaaccacttactggtttgcttcccatgtcttgctcagtttactttttaaaatatttatttatttatttatttacttatttatttattgtatacgagtacactatagctgtcctcagacacaccagaggagggcatcagattccactacagatggttgtgagcctccatgtggttgttgggaactgatctcacaacctccggaagagcaaccatgctcttaaccactgagccatcatctctccagccctcagcttaatttcttttgtagctcaggaccacctacccagaggtgtcactgccacagtgagatggcctttccacatcaataattaactaagaaaattcctccatgtacttgcctacaaggcaatttaatggaatcattttctcaattgatgctcctttttttctcagatgacacgtaacttaaaatgtcaagttgacaagaattagccaacacatttgattccctctcaacttgacatgcaaatacactactagcaaaccataaactttccttcttcatttgtcccccaaatataacattgatattaacatcacaatataaaacatcgtataactttaaaagtcccatagcctttaaacttttcaacattttttaaaggtccaaattctctttcaaagcccaatgtgtcttttaaaagtctctcaactgtaggtacctgtaaagtaaaaaaaatcaaacaagttacatagttatttatttattatttttattagatattttctttacatttcaaatgctcttaaccactgagccatccctattttcaccatttttctttttttaaattagatattttcttcatttacatttcaaatgctatcccgaaagtcccctataccctccctctgccctgctcccctacccacccactcctgtttcttggccctggcattcccctgtactggagcatataaagtttgcaataccaaggggcctctctttccagtgatggccgactaggccatcttctgctacatatgcagctagagatacaagctctgggggtactgattagttcatattgttgcccagaaacatagaacacccaagatacaatttgcaaaacacaataaaatcatgaagagggaagaccaatgggtggatacttcattcctccttagaatagggaaaaaaaatacccatgagaggagttacagagacaaagtttggagctaagacgaaaggatggactatccagagactacaccacctggggatccatcccataatcagccaccaaacccagacactattgcacatgccagcaagatcttgctgaagggaccctgctatagctgtctcgtatgaggctatgccagtgcctggcaaatacagaagtggatgctcacagtcatctataagatggaacacagggcccccaatggagaaggagagaaagcaccgaaggagctgaaggggtctgcaaccctataggtggaataattccttatttcaagagggaagagccagggcacagtcacaatctgaacaaagcaaaaccgaactgtaacactgcatgtgcaacaacatccttcctcggcttcctgctctgccatggtatgaggaggtgaagcgcaggcgctggctcctgctaccagcccacaccacggcttccctaccaccatggactgagccctcaaactgtgaacctgatcatttctccttccatagaacttcggtcatagcaacagaaaagtaactaatatgcatacactgtattggcctttcgtggctgatgtaacaaatgcctcacatttaggagcttaaaacaacataagtgactcttaccactcttgtggccagaggttcaaagtcagcatcactgggttggggtgacagggtcaaagggttggctcctttgtgaggtagcagggtcaactttttcccagtcttttcagcttctggaagctgcatttttgggattgtgattctcccaatccaaactgacaacagtatcaaactgcctttaagttcttacatctttacccatagacctgttgtttgctactttgtgggttgttctttcttccacccttttcccaccctttcaagtccctaacactagaaaaaaggatacaatggaaaggggcctatgctttctgctggttaggggtgtgaggttccctggggaaagttctatcttcctaatcaggatatacaattccttcttctttcttctttgcatgcaactaaacaaactgcaaccaaaaccagcaaccaatcactaactcccaacaacccaacaaccaacccatctattggggctccagcattttttgttttgttttgttttttgtttttttggggggggttccagcatttatatatactctgaaaagtccccagaattctgaacatcaattgcagaaactgtctgcagctggcaaactcacacccctcttagagcatgaggccaatcatagtcagctgctgtggacaatctgaagcattgccatatcccatacctgggattaaaatgaaaacacttatctctgcatgtgttttatttttttatttttttaagaaaccagaattctcacattctcactacagatctgggtagcttttaactcttatcagaggattttgtttttgcagtggacattgattaatatagagccccagccagtcagagttcagagagtaactgaataactgtcctcagccctagatgggaatactcatgtcacacttcacatgcctcggagaacattaaggaagggggaatggaaagactcagagccaggatggccatggagtgctgtcttctgcacacaacagggctctccacccacagatcacagtggttctggtcttccaaacaagacctttgaaagaccaagctagtcagaactctaacacaggtggatgaggggcttgggaaccctacccatagctgagaagcgttggcacctgaagactgctggtgtagggacagccagttttcttaaggggagtggtatctgttgttgcccacgggcacgtggacaaccctggttggactcagcgggctatgagaggagaacatgaagttgggaaggggacatggcaagggggtgtgaggggggagagcacggggttgctttgatcaatgtacactgtctacctggacaacagtctcaaagaatgaatcatatgtagttaaaacgcagcctccattggcttctcggctgcctggaataaaagggcaaagacctaaaggccctcgtgcccttcttccttcgttccttctgcttttctgctccccaagctggctttggtcacactggctgccttcttcctgtttcctgaatatgccagacatgctccctccataagccctcagcctgcagtgtccctcctcggaatttccacgtgccttctctttcttcctcgtgtctttgcaaaatgctgtcttttttggtgtgttgggttaaagtgtggctgggcagctctgactactccagttctagggtctccctaccactctctacatggccttctctggtttatttttttcctactatttttattgtctcttttcccactcagaaaggaatcttatcagtgcaggaattcgtgtgtgctttgttcatggctgtatatccagctgttgaccaggcctgcttattatggataataaatacttattgaacacataaaagaattcccagtcacatctgccaagtgcctcttgccatataggcctgcactcatgggatagggacttgggcatctttgtagaggtcatggatcagcagcaggccacacactttagtttcaatgaatgcacaaaaaatgcacaatgggcagtttacctcctaacataaccaggctgagctgtgtagagtacaggggagctttgagagagaactgcaaagctgaggagaccactgagcccttatgtgaagagagacaccgcctcaccctctcaagtcagtgaacttcccagtctgacacagcaaagaccgtgtgactgtcccctgagagaaagggtctccctctgccctgtttactacctctgcatctaagccagaggcccagagtgacagaagttgagacctgtgtcagttattgctgtcacctaagcccctaggtcacatctatactggggcatcatggactcaaatagacacaaggtcatgtctacaccggggcatcatggacgcgaatagaaaccattttcaccaagcttagttttgctgtttaacccaaagtcacactgtcctgagaaatgctattttcctgtgaagtgatccttaaggtgaacctgagggcgttttttttttttttccagcttcacagctgcagatattaaacacagtctcacagattacaaatcactgcaagccttgacaaggtctggaagaacggtgggaggggaggctttttaactgtgcatcaagattgtgagtagaaaggtagttacaactgacttgtttttacaaagaggcgctttaaagaatggtgaataatgtgtttgtcttgcacgccaaataaagtcatttaacatgaaaaccccccttgggctgctagtgcttgcagtggcttggaaatccagttctgggtgccctctgagtgtgggaatgtgttctcccccgtgcgagctttccgaagggaaggaatctgtgtgagtagagtagccaagaggaggccccagggagggcaaagcctcacaggcctttgcagaaagtccgggtctcagggaacagctcacgtttctgttggaaagggaaggctgaatggtgacatgtgtcagtggccctccggaagccagctcctgtcctggctgcaccgcccttcatctgctttttaacatggaagatttgatgctgggttggagtcttgagtgtcagcatgatgtgctgacaaaaagatccagggcacagctagccttctaggctgaagactggcaggccataccaactatattggaaaacaattgtactgactagagcatccttttgcttccctgtgtgtcagtcagatgcagctacctgtcagaaacaattagcacagttatgttgtcactgctctaagagctcattgtcggagcctaggtctccttgtctctatgtctctagcatccagcacggagcctggctcatagcttcggctcacacacatttattgaatgtgacagtgtttctaactatcacgctctgtgaatagcgaggcggatgattacactccataaaaatgcagttagcattcccaagcctgattttcctacttaaaatgaccactctaatcttgtctccggggctgggttgatagatatgccctgacctgaacaccgggacatgagggttggcatttcaggccagagttctgtgagaaaggagcagagcagacaggggctggctggggtggtccagagctgtggtcccagcaaggggaggggagagaccctgtctccgaaaaacaaaaaggagaatgacagaggaagacagtcacaagcacacacacactcacacacacagaccacacacatactcacacacacacacaacatacacacacacacagagggggagggggagggatggagagagaaggccagaagtcatgttgaaattggtgaaccctaaatcttagagccttagcaggtgggcaggaaatgcctgttttaaatgctgcttgtgactcaaaatcttttccaaccgtgccaggccccttatttggggattctggctggaaagaaagtcagcgtactatagattcttcgtactatagattcttctcctccaatgtacaatttgatctctttccagcacgcacattactgtgaattcctcagtaataatgaggcctcactgggtcactctggttttccttgataatcttctttgataatatttacacactgcctgggagctaggagctggatagatcccagacagacagacagacagacagggaaggggacctcagatagatgtcagtggtggcaaacacccagcttcttctttgaagccctgtgagcttttcttcctgccagcatgggcttcctttctgtctgcctggtccaagctggccaggtatgttgaagctggttctaagcatgtcaccctttctttgtttaagctggacaatccatatttagggaaatggccccatcccaggccaccaaaaccacttaaaaccgtcagccttcaggggagacagactggctttcaggtgcggtctctaccttttagggagtcttcctctctgtgtgtcttgctgtatatttggcttggtctttaatatttctgttacctgtctgtcattgcctgctgtgtctgagaagtttcctgcttctcagttctttacatggtagagaaaatgaatgaatgtgatcaagatccctagatggtagtaggacctcactgcagagctttctgataggaatggatggcatgtgaattcttcagacatagatttcttctttgatggctagtgactctcgacagattcctctgtgattccctatagctgtctgggctttgccagcgattacaaccacatgccctaggagagccacatctcctgccggagcctcctatgtgcattgtctttggtgccagccacgggatgctttctagagaagcagcctgctctagagcataggtggcttcaggctcaaccacgttcacatggagacaagagtcatcccagaatatctcagctgtggccacatgccacttgctctcgagtgatgccccctgcaaatgactctagagggtagatcacccagtgatcagcactgggtgataagcaggagaaaggccagcatcattcccaggtctcagagctgttatagttgggcttatcttatggggcttctgggttttgactcaaggtcttcatgctcacgtggtaagcactgtactggcagagtcatcttccctgctctgattccggccttcttaatgtggacagcctggatgtggtctcttcaactcctccactgctctagactctccaacagtggaagccactgcactagaacaaagccactgatcctatggggacatgtatcccagttccaggaaggcagaaatggagaaaccaggtaggtctgacctcagatctgagatcacactcttccccaggccagctgtaacctttgcttatccagcagggggatgaacgtgtgtgttttcctcttctcctcaatggtgcccacatcgtttctgtgtgagttgctcatgtctctggacatgtgccgtgctggcacatgccttctttccagtctgtgcagggcacaacagctgagtgttaaggagagctctgaggtgcacggcaggagaatgctcaacttcatcactcatggaggagcacagctggggagcactgatagggagcactgctggagaacatgaagactcagtcagtgctgcttgcctcctcttgtcagtccctgaagcactgtgcatcttcttcatgagggagaccttccagggaacaccagaggacagaaacattttgttactggcctcgaagactatagaggcaactaagatgggagtcttacacgcaggcctccctaaggctgtagacttagaggatgctcaaattcctgctgctattgggctgtgggtgggtgtgagagcaccaaggcccactggtcatcattttagtttctttcaagaccctaggttgacaactcaacatgcctggcaggaaccaaggagcctttttggtgttccccttggaagggagcactcccaggtcactgggactaagatggggggtcctcgggggatggagtcacactccaggaggtcaggattgttggggtacagcttggagagcaatggtgacatagacctgggatggagggtagggtgctgcccagtagagtctagtcctgtgggatgcaggggcagctggcaggcannnnnnnnnnnnnnnnnnnnnnnnnnnnnnnnnnnnnnnnnnnnnnnnnnnnnnnnnnnnnnnnnnnnnnnnnnnnnnnnnnnnnnnnnnnnnnnnnnnnnnnnnnnnnnnnnnnnnnnnnnnnnnnnnnnnnnnnnnnnnnnnnnnnnnnnnnnnnnnnnnnnnnnnnnnnnnnnnnnnnnnnnnnnnnnnnnnnnnnnnnnnnnnnnnnnnnnnnnnnnnnnnnnnnnnnnnnnnnnnnnnnnnnnnnnnnnnnnnnnnnnnnnnnnnnnnnnnnnnnnnnnnnnnnnnnnnnnnnnnnnnnnnnnnnnnnnnnnnnnnnnnnnnnnnnnnnnnnnnnnnnnnnnnnnnnnnnnnnnnnnnnnnnnnnnnnnnnnnnnnnnnnnnnnnnnnnnnnnnnnnnnnnnnnnnnnnnnnnnnnnnnnnnnnnnnnnnnnnnnnnnnnnnnnnnnnnnnnnnnnnnnnnnnnnnnnnnnnnnnnnnnnnnnnnnnnnnnnnnnnnnnnnnnnnnnnnnnnnnnnnnnnnnnnnnnnnnnnnnnnnnnnnnnnnnnnnnnnnnnnnnnnnnnnnnnnnnnnnnnnnnnnnnnnnnnnnnnnnnnnnnnnnnnnnnnnnnnnnnnnnnnnnnnnnnnnnnnnnnnnnnnnnnnnnnnnnnnnnnnnnnnnnnnnnnnnnnnnnnnnnnnnnnnnnnnnnnnnnnnnnnnnnnnnnnnnnnnnnnnnnnnnnnnnnnnnnnnnnnnnnnnnnnnnnnnnnnnnnnnnnnnnnnnnnnnnnnnnnnnnnnnnnnnnnnnnnnnnnnnnnnnnnnnnnnnnnnnnnnnnnnnnnnnnnnnnnnnnnnnnnnnnnnnnnnnnnnnnnnnnnnnnnnnnnnnnnnnnnnnnnnnnnnnnnnnnnnnnnnnnnnnnnnnnnnnnnnnnnnnnnnnnnnnnnnnnnnnnnnnnnnnnnnnnnnnnnnnnnnnnnnnnnnnnnnnnnnnnnnnnnnnnnnnnnnnnnnnnnnnnnnnnnnnnnnnnnnnnnnnnnnnnnnnnnnnnnnnnnnnnnnnnnnnnnnnnnnnnnnnnnnnnnnnnnnnnnnnnnnnnnnnnnnnnnnnnnnnnnnnnnnnnnnnnnnnnnnnnnnnnnnnnnnnnnnnnnnnnnnnnnnnnnnnnnnnnnnnnnnnnnnnnnnnnnnnnnnnnnnnnnnnnnnnnnnnnnnnnnnnnnnnnnnnnnnnnnnnnnnnnnnnnnnnnnnnnnnnnnnnnnnnnnnnnnnnnnnnnnnnnnnnnnnnnnnnnnnnnnnnnnnnnnnnnnnnnnnnnnnnnnnnnnnnnnnnnnnnnnnnnnnnnnnnnnnnnnnnnnnnnnnnnnnnnnnnnnnnnnnnnnnnnnnnnnnnnnnnnnnnnnnnnnnnnnnnnnnnnnnnnnnnnnnnnnnnnnnnnnnnnnnnnnnnnnnnnnnnnnnnnnnnnnnnnnnnnnnnnnnnnnnnnnnnnnnnnnnnnnnnnnnnnnnnnnnnnnnnnnnnnnnnnnnnnnnnnnnnnnnnnnnnnnnnnnnnnnnnnnnnnnnnnnnnnnnnnnnnnnnnnnnnnnnnnnnnnnnnnnnnnnnnnnnnnnnnnnnnnnnnnnnnnnnnnnnnnnnnnnnnnnnnnnnnnnnnnnnnnnnnnnnnnnnnnnnnnnnnnnnnnnnnnnnnnnnnnnnnnnnnnnnnnnnnnnnnnnnnnnnnnnnnnnnnnnnnnnnnnnnnnnnnnnnnnnnnnnnnnnnnnnnnnnnnnnnnnnnnnnnnnnnnnnnnnnnnnnnnnnnnnnnnnnnnnnnnnnnnnnnnnnnnnnnnnnnnnnnnnnnnnnnnnnnnnnnnnnnnnnnnnnnnnnnnnnnnnnnnnnnnnnnnnnnnnnnnnnnnnnnnnnnnnnnnnnnnnnnnnnnnnnnnnnnnnnnnnnnnnnnnnnnnnnnnnnnnnnnnnnnnnnnnnnnnnnnnnnnnnnnnnnnnnnnnnnnnnnnnnnnnnnnnnnnnnnnnnnnnnnnnnnnnnnnnnnnnnnnnnnnnnnnnnnnnnnnnnnnnnnnnnnnnnnnnnnnnnnnnnnnnnnnnnnnnnnnnnnnnnnnnnnnnnnnnnnnnnnnnnnnnnnnnnnnnnnnnnnnnnnnnnnnnnnnnnnnnnnnnnnnnnnnnnnnnnnnnnnnnnnnnnnnnnnnnnnnnnnnnnnnnnnnnnnnnnnnnnnnnnnnnnnnnnnnnnnnnnnnnnnnnnnnnnnnnnnnnnnnnnnnnnnnnnnnnnnnnnnnnnnnnnnnnnnnnnnnnnnnnnnnnnnnnnnnnnnnnnnnnnnnnnnnnnnnnnnnnnnnnnnnnnnnnnnnnnnnnnnnnnnnnnnnnnnnnnnnnnnnnnnnnnnnnnnnnnnnnnnnnnnnnnnnnnnnnnnnnnnnnnnnnnnnnnnnnnnnnnnnnnnnnnnnnnnnnnnnnnnnnnnnnnnnnnnnnnnnnnnnnnnnnnnnnnnnnnnnnnnnnnnnnnnnnnnnnnnnnnnnnnnnnnnnnnnnnnnnnnnnnnnnnnnnnnnnnnnnnnnnnnnnnnnnnnnnnnnnnnnnnnnnnnnnnnnnnnnnnnnnnnnnnnnnnnnnnnnnnnnnnnnnnnnnnnnnnnnnnnnnnnnnnnnnnnnnnnnnnnnnnnnnnnnnnnnnnnnnnnnnnnnnnnnnnnnnnnnnnnnnnnnnnnnnnnnnnnnnnnnnnnnnnnnnnnnnnnnnnnnnnnnnnnnnnnnnnnnnnnnnnnnnnnnnnnnnnnnnnnnnnnnnnnnnnnnnnnnnnnnnnnnnnnnnnnnnnnnnnnnnnnnnnnnnnnnnnnnnnnnnnnnnnnnnnnnnnnnnnnnnnnnnnnnnnnnnnnnnnnnnnnnnnnnnnnnnnnnnnnnnnnnnnnnnnnnnnnnnnnnnnnnnnnnnnnnnnnnnnnnnnnnnnnnnnnnnnnnnnnnnnnnnnnnnnnnnnnnnnnnnnnnnnnnnnnnnnnnnnnnnnnnnnnnnnnnnnnnnnnnnnnnnnnnnnnnnnnnnnnnnnnnnnnnnnnnnnnnnnnnnnnnnnnnnnnnnnnnnnnnnnnnnnnnnnnnnnnnnnnnnnnnnnnnnnnnnnnnnnnnnnnnnnnnnnnnnnnnnnnnnnnnnnnnnnnnnnnnnnnnnnnnnnnnnnnnnnnnnnnnnnnnnnnnnnnnnnnnnnnnnnnnnnnnnnnnnnnnnnnnnnnnnnnnnnnnnnnnnnnnnnnnnnnnnnnnnnnnnnnnnnnnnnnnnnnnnnnnnnnnnnnnnnnnnnnnnnnnnnnnnnnnnnnnnnnnnnnnnnnnnnnnnnnnnnnnnnnnnnnnnnnnnnnnnnnnnnnnnnnnnnnnnnnnnnnnnnnnnnnnnnnnnnnnnnnnnnnnnnnnnnnnnnnnnnnnnnnnnnnnnnnnnnnnnnnnnnnnnnnnnnnnnnnnnnnnnnnnnnnnnnnnnnnnnnnnnnnnnnnnnnnnnnnnnnnnnnnnnnnnnnnnnnnnnnnnnnnnnnnnnnnnnnnnnnnnnnnnnnnnnnnnnnnnnnnnnnnnnnnnnnnnnnnnnnnnnnnnnnnnnnnnnnnnnnnnnnnnnnnnnnnnnnnnnnnnnnnnnnnnnnnnnnnnnnnnnnnnnnnnnnnnnnnnnnnnnnnnnnnnnnnnnnnnnnnnnnnnnnnnnnnnnnnnnnnnnnnnnnnntctcctcttccatgtgtttcatagacagggcctgtaggacaacagtagcctcggaacccgaggaggactgctcatggaatgtgcccaggtggatttctccctgctgaacatctttgcattttaaagctgcaattggaaacacatacttctagttgaagagactatgagaggcagaagtagggccagctggggctgccatgaggctaaggagctagcctgtgttcaggggcaatagagtccaagttctaaaggcacgggggagatgtgcagagagagggtcaggatagtggccaccactttagttttgattatttgggaatctgacatcatgcaccccgaactcactcacctcccagtactccatgtctgctccattaccccatggacccaccacaaagaataggaggaggaggaggagaaaagaaaaaagagaaaacaaacatagcacaaagtcttgctacccatatactcgcaggagcatggttcaaactccgagtggccagccccccccccccccaggggagttgagtttcccttcacttgcaccctctccagaagccatcaactggggaaagccatgcagccgccgaagaggggcaagaccagctgttctgtacacgatggtggcagcactttatgctgaacttaaataccactaaactacatttaagatggttaacatggtgctgggcagtggtggcacatgcctttaatcacagcacttgggaggcagaggcaggtggatttctgagttcgaggccagcctggtctaaagagtaagttccaggacagccggggctacacagagaaacattgtcaaaaaaaaaaagaaaaaaagaaaaaaaaagaaaaagaaaaaaagaaagaaagaaaagaaaaagaaagaaaaaagaaagaaaaaaagaaagactttggttaacacatgatggcagttggagctggctgggaggcaggctttcatatgagagccccttccaagtacatgaagactcaaaaccattttggaattaagaccttgttaagaattccctggtggaaggtgaaaaagactcaaaatcacaggtgagaaccaggttggaaatttcatgatctgggaatgctcaggactcactccgctctacctacaggaagaaaaacggggtgtctgtagatggtatctctctccactgaaaacattgtgcttagttagcatagacctggggtttggcattcatctctcaggaagggctgcctgtccggaattctggaactaggaagacttccatatctgagtagggtcagaagcatgctcgatgtcttaggcaacttgcaactgcaggaactgaatggatacctcctgttaggctgccattgtaagctgagaaatgacgatctaaaactgatccaggaatgccgaatccaggggactccatgagacttctacatgtgccagagtaggtgctaggttgtagtgaaatggctcacacctccgctaatctcacacatcgtgtggttataaagctcccatgagcaagtgattggatgcagcaactaaggcagagtccatccgaggaagcagtctggatccagtgttcatgtgtgccctcgggtgttcacataggaagagaggcgataaaacccttgcctgtctacgtcacttggttacttgagattggaactcaggttactgtgctaattcagcaagccccttacacactgagccattccccacccacccacccccagcctcctgtgcctagggtttcttattaacaagaggacaaacaaacaacaccagagtgctagagcccacagagagaaagtcatgcatttgcaagccccatttatgtgaactgtctgcagccgctggagacagaaaccagatacacgctggattcgttagccccaccactgaccacattggggattcaaaagcttttttgctaatctggatagatcaacactgtggacattctagacagtattcttcaggtctgagaaagctgaagtgggttccctgaagaactcacctcggttctgtaccctgctgggccggcagactgcttggaacatgagcaggaaactgggttacagacaaaaacttactaaccagaaacaccagccagcaatgccacaaatgctacatgcagacaagccctacatcaagtattcaggacacaatatcttggctgaaagccatttctgaatgagccaaaaataattgcccaagaggcttggggtaaagccaaggaaagcatagagcagagccacagaaacatgaaacctagaaatgcattggcctggaagtgggtctctcctgctctgtaccatatctagaaggacatttcaaaggagacggcaagctacctactgtgtgcaggtcaaacggagaagaccctttactgtgtggagcctggccatggtgcagccacgttggctgagagctgtgaggtttcattggctttggaggggcaaaggagatgaaggcaatgagaaagagggtgaattatggagccaggcttacacattatcattcattcaacaagcctcaggtgccagggagccccaggtgacagggaaagaaagatgcgccaggcatgaggtagaaggaaggaaggagtaccactcagtgtatgtaagtgacgttatacagctgttcctcaacctaatacctgaactgtcttgataaacatgtcacagtgtgactgtatcagaagttggaaatgcgctcattacacctattctacagaacactacaggttagctaacagtaactacagactacctccaatttgctcaaaatgcctaaagcccagcccgactctctaccatgaaactcccctttataagagaataccaagtatactgtgggatttattgggatcagtcctgaacgtgatagaatggctgtgtaggcataccttcaacccaccttacagtcggaaaatcatgcctcaaggatggtctgtatatacaccagacacttcactgaagcctgtgggggacatattcccaccggagtcttagtttcccttcttgttgctgtgataacacatcccaacaaaagcaactcagggaggagggtccattctggctcacagttcacagtccatcatggtgtggaagtccaggcaccaggaacttgatgcagctggtgaggctacatccacagtcgggaagcagagatgcatgctttgctcagctcccgttctccggctctagtccagatcctatcccaaggacctgtctcatccaaagtgggtgagtcttcccaccttgatcaacctaacagacacacccagaggttaataggacccagataatccattgcaggtgtgcctggaggtttgtgtcttagttacgtctggatcatgttaaactgtcaatcaacactaacaccctcagcacacttggtgggcttgtcttctttagtagattgctgctctgctgtgtatagaactgtaaaacttaggatagagagtaattgagtgaatataagagatttggaggggcaggaagaggaaggaatggctattgatcaactgtgaccaggaagtcccatcttagagataaaaatgtcttttggaaaatttcagaactccatgtgatatatagtaaataacataatgtaatgcaatttactataatatccatctctaccttttcacaactatccagtaaaactaatgtttcacatccatgcttctagagtctgtagatagatgagttttatggtggaggagtaagctttgtatccactactctgccacttaggctacatagacataaaaatttatagtaataataatagtgatagcaataataacaatagtaataataaaagcagttacaatactaataaaaacagtaatagtaaaaacaatgtaatggtaatggtgatattaacaacagcagttagagtaaccatcctggctgattttttttttccagttgaggaattgcctctgtcagattggcctgtaggcctgtctgtgaagacttctcttgattaaggattgatgtgggagtgcccatcccactgtgggtgatgccacccctcctcaagttgtgagaataacagtattcttcaggtggtggcaacaatgatattaataggtgattgtaacagtaacactagcagtaaggggatggtgcagtagcaacatgaacagagatagtaacaatagtatcatggatatagtaacaatagtatcatgcttgtagtaacaacactagtggggcagcctttactgaaacatgtgtgcccctttgtccagtgaaggaggtccacaggcagtgcaaggcaggtccttggcaagaagacttacttctcttttaagtgacaggaggtgctggcagccatcttactaattagccatttttactgcagtaaaatatacacagaataaaatgtacccatcagattattctaaggtataattcagtacgccagcagtactgtggaaccatcgccacagcctgatctttcccttcacccccaaaggaacctgtgtgtgcactacacagccactctgtccgccctctctcttcccactgtctggaaatgctggtcacattctatctctttttcatactctttgattgcataagaaaccttctagaactctctgtagcaaagggatgagaagaaccctagtggctgttacagtctttctctattcatccccaagtgctgccgtggggcagagaggcagagcaggttctgagacaaatggggcggtggagaacaggtagatctgaaggacaccaatatgtcactagacattcagatcacttctgcatctggttgacattgtcctttctcaggttgcctatcatggcataaacttatgcagttgagtatgccttggcccttctgtctttctctcttaagtgctgggattatagactctgccaccacaaccagcttatgaatcctttgatgtggaagccagggattgtgcatgcaaagcaagctctccaccaataaaaatgtgtactcaactccagactgggttcttgttcttttaagatttggtttttggtgtgtgcatgcatgagtgtgtgtgtgtgtgtgtgtgtgtgtgtgtgtatgtgtgtgtgtacacagacacacgcctgagaaggccaaaagaggttgtttgggcctctggactggagttacaggcagtcacgagccatctgacagggttctgggaactaaacaccagccctttgcaagagcagcaaacactctcagccactgagccaactctccagccacagacccggttcttgatattcctcttgaccagcagcaatgctcacccatatactctgtgtcttgaaacacacaccgactttttagggactatgttttagactgcaagcaggaaaagagcagtgtactgggtatttgtagcaggagctcttgggcaccattctgttttaaaggtgatgatttcaaagtgtaaaaaggtttaagttaatactgttcttgtcatgcttacaactttcccttcctccttatgtgattttgttcagtccctttgttgttgttacaaactgaggacttgtgcccctacaaacacatatactgaaatcatgtccccaaatggtggcattcaaagctttgagggtgattggatcagaaagattgagcctctctggatgggattagtgccctcataagaaaggccttggaatgctctctaatgttctctctgccatgtgtagatacagcaaggagttccagccttctagggcccctgctgggagccaccccactttgagcatgtaacactgtgccccgtaagaggttactctttgagccccaatctgtggtattctgttatagcaccaaggatgactgacctatcagtaacaaaggaggtgggtggaggggcacacacagcccaccatttccagccagtgtctatgaccctcttcccaatggtcgatggttggctaaccaggaaagactccagtccagtggcgcttcctggagcaggcttctgtcagcaatgcctgtctagtcaggactgggatgccagggtcaaagcatccctgacagacggagatccatgtcccggtgctgtgagaaacaactgttactctacaatagcagcatttcgtaataagagcactggagacttagaggcaggagctcgaggcagtctactttgtcatcttgtcaagttgggagtcaggctaagaatggcagagatgctgactaagccaagggaacagatcacaaaccctaatgcatggccttttcccttcccttccattcccttnnnnnnnnnnnnnnnnnnnnnnnnnnnnnnnnnnnnnnnnnnnnnnnnnnnnnnnnnnnnnnnnnnnnnnnnnnnnnnnnnnnnnnnnnnnnnnnnnnnnnnnnnnnnnnnnnnnnnnnnnnnnnnnnnnnnnnnnnnnnnnnnnnnnnnnnnnnnnnnnnnnnnnnnnnnnnnnnnnnnnnnnnnnnnnnnnnnnnnnnnnnnnnnnnnnnnnnnnnnnnnnnnnnnnnnnnnnnnnnnnnnnnnnnnnnnnnnnnnnnnnnnnnnnnnnnnnnnnnnnnnnnnnnnnnnnnnnnnnnnnnnnnnnnnnnnnnnnnnnnnnnnnnnnnnnnnnnnnnnnnnnnnnnnnnnnnnnnnnnnnnnnnnnnnnnnnnnnnnnnnnnnnnnnnnnnnnnnnnnnnnnnnnnnnnnnnnnnnnnnnnnnnnnnnnnnnnnnnnnnnnnnnnnnnnnnnnnnnnnnnnnnnnnnnnnnnnnnnnnnnnnnnnnnnnnnnnnntgtgtgtgtgtgtgtgtgtgtgtgtgtgcacgcgcacacatacacagggtagcttagcagttggcatgtgtgtgtgtgggtagtttggagcttaaatggttgggtctagactaagagccattaacagatgcttggtactttctgttcatttgtagctggatttacactacctcaaggcacctttgaaaacgaaccatcagattttcttgctatctaatgagccagttgcagtgtcatacggcttcacttggatctcattcccaccctaccttacttaactccatgcatcaacctgcatggccaggaacacactgctcttctctttcccagaacaggggaactgagaagcgttttcactcatctttctctttctgagctcctccagcagatacttggctgcacagccaaagactcaatggtccctgcacatggctcactgtcttgcttaaaactgtgtgccctcctaacaggtacccctgttgtgttatgtgttgagaggcagaggtgagagtgagagagcagggagtttccctggtcagtgtaaactactgagggtggtggggacactctaggagccaagttccagggggaagcaggtcctttattgcctgtctgtggggtgacagactgcagcaggtactgcttgccacctgaatacacagcatgaccctttgaccttgaacatatgttacaagtttcccatacattctcatgggtgagatgctgagtaacaatgacctccttaaaggcaattctaaggctgttacaggatgcttaaggcacaggcacttgctaagcatcttttcctcctggctcctaatttttgcaggtgccagggagataacagattaaatctgacattgtcgaatagcaagggctgccctgtgatgctgatatgattgctgtagcattttaaattgagaaacatgagaacataatgtaggaagtggaatcctaagtactgaccacggtccccagggagcttttaatagattcgagtagctgtttttcatgagaacttgcccagagagctggctctgggcatatgctttctgaatctgagaaggagaagctataagctggctgtggtctggaagagcatcgctttgttttcttgtgggttagggctgggattttgccttacctcttaagtggtcatgtcaaccttcaggccttgttttgctgttgtgcacttgaagagtggcctttaccttcctgactctcagttttcattactagcttgattcactactgacgggccaggtgctaccatgggagtagatgtggagtattgttggaggactggctgaacctgggtgctcaagggcgctcctcttatgagaaagctcaggaaatatatcccgaatgaggaaatctggcctccagagaggcatgcaaatatcttgcaaagtcctagtgctgttatttgaagcttagttttattataatgtaatctgagattttatgttgcttttagttatgttattatggctgattgtgtgtgcatgcacatgtgtgtgtgcatgtgtacacacctataataatgatcgggtttgtggatttatttggttaagttttactgttcagcaaaaagaaccagtgtttcaaaaagctgttatatgtaatttccttctttttgtttaagcacattcagtttcttaaagtacaactgtacgcatacttcagcacatgataatttctctaataagcctgtctgtgaggtctggggtggggctttgtggtagtgtgcttgcctagggcatacaaaacccttggtctctagcactgaaaaaaatattagcacatgttagaggacatacatcatatcctagaacaagaaaagaatgaagggtaaactagtctaatgggggtgaacatgggatttggtaagtaatagagaaagaatgaatgtgtagcacattctgggcaactgtattaacgtgcaaatgaacagcttgaagcctgcagattctttccagatgaggacaagctgtgtaggccatcagagaggcatggccacaaatactgacactgctccaacaagcaccactaccggcctcctgtctccatttgtagtagcagatggatctcatggatgctcgtttccaaccaagggctatgctgcttgtgaggaaacctatcacctggtgtactgtctctcagtctcagcccctttcctacacaagaccacccatgacacatggcaagctgtgtaagaacagcttgggaaatacaaagacagtctgattctcaggccaacagcgccctttgctctatctgagaggagcatgcttcctcgttactgggaaaggaaacatggacattgattacttcagaccttgcttgtctgactcactgttggtgtgctctgagtgatagtccagggctaggcatagacgtctaagtgaggcactgaccttagtctccgagcagagaagaaggagctcctctgcctacctttgccgttgccttgtgatgggctcagcttcctgctccgttgtagctgcttagtttttctttctgggaatcagtaggattacaaagcaaagctctccactgttctgagccttcacatgctgaaaacatcactacagtgttagattcttctgtcaaaaaacccaggccctacttccttaaaatattccttactactcttctcaataatgctgtcttaaaaataatgttcacttctcttttagattttaggatccccnnnnnnnnnnnnnnnnnnnnnnnnnnnnnnnnnnnnnnnnnnnnnnnnnnnnnnnnnnnnnnnnnnnnnnnnnnnnnnnnnnnnnnnnnnnnnnnnnnnnnnnnnnnnnnnnnnnnnnnnnnnnnnnnnnnnnnnnnnnnnnnnnnnnnnnnnnnnnnnnnnnnnnntagcttctggactcttcctcctctatatcttctttttctgtctatgctatatttggtggttttctcagtcatttttattttcacagtattaaactgctgtgatgaacagcattgccacatgtgggtttatgtgatacctgccagtattaaaaacatatttctccttgagtcaagattacatttaaaataatttatatagcaggtaacctggcagcatatctctgagagtaagcttggccctgtggtatataataatgctcaacaagtgaaaaaaaaaaaaaaaggctcagcacatgagcttgaccctcagcacagaagactcagcacacgagggcctcggcttgacccccagcacagaaaagggggaataaagacaacagtgtagacagtatgattcaagtagtcatcagtggagtgctggccaaactctcacacatctgtagagggaatactagataatgctcagttacaaagcagacctccaaatactgactaccgatagagtgtgatcacaatgatattgaaagattcagccatggagagtggagtgttggggagcagtgagattcttgtacacatgtaaagtgtcactaagtacacaagatgttgataaggcctgacattggggagaaaactgcatatgaaggagataacagtcagaaagaaatgcgagtgtcttcttttataacctatgaattgtgacatttaaaatgttatataaacgaatcatgtaagaaagtaagatgcagccggaaggcctttaatgctagcgctcaggaggcagaggcagatggatctctgtgagttcaaggtcagcctggtctacaaagtgagttccagaacagccagggctacacagagaaaccctgtctcaaaaaaaaaaaaaaaaatcaagaaggaggaggaagagaaggaggaggagaaaaggaaataatagataatagatagacagacagacagacagacagacagatagatagatagatagatagacagacagatagataaaggtgcatgggcctgacaggtaaaaacataacattctgtgaagcacctgactgcttaaggaaatagagggaaacgggacacaaggctcagactcgtcatgaactatggagctgttccatctctgtagtctgtgcctgacctgcccaatatattctgtctataaggaaagtcatagatacaatgccgcagggtcctgagatgctgggcttgcttttcttttaggtttcaggaatgggaattactaatatttggggtaaagaaggaaggaatattgccttattttgaaccatttctaagcaactgaatagtcctctaactaccagattttggaattcataggatacactgtgcagctgggcagggaaactcctacatctttctctgatggttgtcgactgatcagcttgtgatcacaaattatactgccctcatttctaatttgtccacatattttaagttttggtttatccaccaagagttgttttattgctggttattttttgaggaatgatatttccctcttctgtgagaaagttaatggcagtgttttggaagttgcctgctttccacagcctcacttctctacgtgctggctgtcttctgccaagtctgctctccatcctgaaagtcagggtccctttgaaaatcaggtctttggggctggatctgaggtttgagttctgagcagttggatgctttggagcatcacacagctcatgtgatcttctgagctttgcagatgggcgtcccagatactggttgtacctttagattttcccctgagctctttagatttctgagaaaagcttttcatcacttgctggaggccttgagttctgagaataagctggagacagttgaggatcttggtattgggacagctctccagggaatagaaccgatagttttcctcactcaggaattaatttacacttctctaggggctatagtcagacgatttcctggcaagagttctgaggtgagttgaggacctgttttggtgaccgtaatcaggtttgctccccttggggaggagaagtctgagtaagagaccacgcagagaaactggcgagggcgcagagtccccttcggagacaaccgtgatttcagagaggacagatgtggttgttgtggtttgccttactctgtccactgagcagaggccagtgcccaccccaattagatttttctgtccctgttggcagtctttgaggtcagaatctttgacaaccctttgggatctcccatgagttttcaaggaaacacagaggactgaatctaccctggtaggtggaaggaagtatatgggctgagatctcagtgtgagagttgcccttatcaatgcaactgtgtgagtttcaccattaccagggatgactgagggaagactgggtcatactccttgtttcccattaatgaggaagaatctgctgcttccctgaagaccaatgtgtcccctagagagtcgccagcatctacaagaacagggtacactgtcctttcccagtagacacctctgctaacccatcgttcatgccttctgtcctgaagcagagcaatgagcaaagagggtgggtacatgagaaaggacaaccaggatgggccaaggaatgtggtcgtaatgttctagtcccgaagagcaggccttgtagagccagcaagaatgccggcctctctggaaccagggtgcaaagccccacccaattgtgggtaggaaaaatttgttgcttggtcacctgtatgtcaaggccccagatcaggatcttagccaggatcagtcaggatgggaagcaactttgccaggtggcaaagtctctgactccctacccagaatgtctctggggggaggacagcagtgggaggagacataacctgcccccccccaactttccccaatacattcaattaaaaaatctccccagtgtcccaagtacaaattgtaatgggagaaaaggtggaggctcaaaccggagatttgcatcttatcataatgaatgtcaggagtctcaaagaacccagatgaatctctctacaaacttaatgacttagagtctgccaattagtggaaaagggaccaacctggacaacatggtgtatgagtgtgtgtgtgtgtgtgtgtgtgtgtgtgtgtgtgcaacaagttaacaatctgctgattgccacccaaatgggttcctgaagagaagagcatgctactatttctactttttctcttcccaaataaacagaagtcctgagtgcacacaccattaaagacagacttgaggttatttccctgttaattgactcccaagtccccaaaccttgaacagcatctgaaagcagcatttctttgtatttggtctaggccctgagtataaatcgagagttccactctgtttgcattaaacctcccaggaagctgctctcacacggcttttgtaaaatgtacagataactagccctctgtctaaatagctccgaaggcaaaaaatctcacatttacttctttggtcaagtgaaattgggtttcaatcagaggtgataaattacccattctgatgctccacagccaagcaatcatctaggcagatgaaggggaacataggggtcctgggtggaagctttggtagtgaacaaaattacgtatgtaatttgtgctactgtttctagggttggaagactgccagtacacacctggacacagctggaaaaggcttcaacctgcctctggctttaggcaactaatagtgagtgctccagccagaggaggcaaacgtcagacttgcagctcattcaaatctcagggtgctgagccccaccctccaggtttcagaaaggtctctgtttagagctctctggattacatatgcgttggggtcattcttacttgaaattcatgattcaataataagccaacattcaaagcactctggtacttgagagatgcatgttgaacgagtcagtatgggatagtggaggtatctggggacctgctgttggatcccattgctggaaaacatctgcctttgttttctttccctttccctctctttcaacacgaagattgaggatgtctgttgtttttttttttttttttcctatccccaactggaggaagggcagcagatgtgtaaaacaaagtcataagtttgggaaggccccatcctatggtttggcccagcacagcttaatctcttaactgttcagcttttcccacattcctccattctagccgagttggtttcctcactactgttggaatacctggaacaccttcagtttgcaaatgccttttttttttttttttgtctcccctgtctttttctcaggagttctctcagatctcctgctcacagaggaaatctctaaatatccagagagaggcacacccccaaaggcagctctgttttctaagtgcctatgggaacatcatatgtgccccattgtacttcatcaaactgtatgccagtcttcttcccatgaccctgggtcccctaggacagtcacatgctttggtaactctaggctacagaaactgtagctttgcaatcctgtagccctgcaactcttagggggaagtgggccgaagattcaactcatggtgtctctgaacctcagcatggctaacattttactgggagactctttgttggctcaacacaggccttgctggccccaactatctccaccccatcatgtccttcatatatatatattcatttgtggatatctttccatgtaatcttccaccttgaggctctgagggattgtgtgatagaaagccaggagaaacttccaaaaacacaatgttgttaaaaggtaagaactctgaattacatttatggtaaacagcgacatttataagtgaccttattttagaaaacttataaaaaaaaaagtctcatgggatttcggctataccagagaaaacctggtggctggttacagaggagctgtaccaatagttcattcacataaagtaaaagatattaatgtagaaagaaggctagttgtcattgtcctggcttggccatgtcacacacatggatgtttccatattcattagagatattacaagcagaatggcatttcttctcattaggctgaggctaaatgaggactgtgggagtcaaagctgaggccagatggagaaacagcacacactgccacagagcgctccaagatgcttccgatgtgggacacagtggctatgacttcccagcaaagtggtagagaccatggttttaatacccaaagaagagatatacttcaaaagagaacgagaagggcttctaagctgttttaggttaaagttgttgcaaactaccaaatgactgctccacttgctcaacagctgttcccatccaacccgcttcttctttcaaactgtgacattcccagagacaaacaattacgtttcctcttttaaaatgtaacgaagttgcttaaaattgggtgtcttaagaatttacagggatttaatctacatacttcaggattttaaaaaattaaaaataaatttgcctttggtctttcaaagttttatatattattctatgtgtgttgattatagtcatccacatctctctccctctagctccccctactgcctccctgtctccctcctaactgtatgtctttttattgctactaataactcactgtgtaaaattagcacagggctgtgtggccacttactgggctatgagctacctaccagtagtcagttctctaaaggagagtgactgtctcttcctcagcagccattaactgccaatatttccttccaaaggggtggggcctcaagggctccttcccattcatgctggcattttggctgacttcctcttgtgtggtaaccatagcagttgtgggttgatgtaagcagtagccatgtcacatccagacagacagacagatttcttctctgcatttccatcggcaactgcttttcctgttcttcatgctaggactgaagttgcctactttgcaatatgattaaccagtgttgcaagacagctgtggtgtggataggaccacagcgcctgagacttagctattctgctgtgctgagatttgatctgaatgacggctctccagaagctggtgtaaccagaaaagggcaggttcactgttattattcctaattcattcatatttattcctcattatcactcattatcatttgctgagttgtaacagatattattctttaaataatctatacataaaagtatacatataaacttctttaaatctttgatattttccccaacaaaatggtttagttttttaagggggcaaaatgtgaatcttagaggagtgttatctattttcacagttaccatggaattccacacctcggttccttccttgtacattatgggggctgggtttctgcggggggaaggccactttctgctctaacattctgctacacggtacacagcagcttggagagatgctgagaagtcatctggcatatctataggcttccagggaaattacggcttaatcaaaaccagcaaaagagtttaatttagaaatcctcatttcttatcccctgattcccatcactttccctgaagaaattacacagccttgttagagaaccaactcggcatgtctcagactttcccctctggactcaagcagcttacctccactctgaggcctctttttgagcaatgcaacataagaatgaggcaacatgttgaggactttcgggttcccagcataggtggccattgtgccttgcttcccaggcaggacaggtaggggtggtaagcatgcatgtgtgcctgtgtagagcaaagtgcaggaaggaatggcggttaatgttttccttagccacccaaattcattgagctgttacaacagatgggctatccagtgatctctgaaaggagaccgtgcctgtgttatgttgaaggtcctgtcatgcagggaaagtaaaagccatatgttctgatgaaaatattttctgataatgtggaacaaacattctgtttctcatcaccatctctcagcacagagtgcacttgaaatcaggttaacgagagctaaatttaatcattgtgtgacctgattgggtatccacagcctgggttatcaaatatcccactttctgttgctctcagttccatctcgctgtttccttagggaatgcaaaacaatggcggcagaaaaataatgaaatgtggtaaatctggtcagagagaagtatgactaaaattccttcctttgtttcatcccttcagccccatgtgtagtgtgggttactttggtttacaaagtactgaagccagttcttagaaggaaagacacagattattggctctactttatcacatattcctttgtttttatagatgccttataaaaacaggtcataacaattaatggccatttgtacaggttttctgggctttcctggaattgcatgagcaagcatgtcattggttcccagcataaacagagggctcttatgcatctaacctttcattcctcaccactgaccacacgcatggatctggagttcagagagtggcagagaaatgtgttgctctgggagacgctggactccctgatgacgaggctgagtgtctggccattctgatggtaactgtgagaaattaacggttgtttctcatataagtctcagcattgtaagctaggaagattttttttttttttttttttttttttttttaggtattgaacccaaaccatccaagaataattctcaaaagaaaagtggtgagaacccccttctacacgtctagattttaaagagctttgtcagtcaagtgtgtcaagtatgttcaatatactgctctgaatccctcccttaccactgagtgaaacacatgttcttaaaagaagtaagtttatatagcaatactggaagagaaaaaaagactgaaggaaaaggcgattactctgaagggatgtctcagaagctgtgtgtttgtagactacacacatcctttaaaataaccatgttagtatgtcttctgtacactcttgttatatcatgctttaaagccgagtagcaggaagaacaccaggacaaacctccttcattcctgttctagcttgcttccctgctgggagatatcattgaccaaaaccaacttggaggagacaagacttatttggcttacagattatatcattgagggaagccaaggcaggaactttaaggcaggattctggaggcaaaatctgaagcacagaccatggggaaatgcagcttactagctctctcccctggcctgagcagttgccttccttatacaatacttccaagagagggcattgactatagtggaacagggccctcagagaggggctcccatatcaattactaatcaaggaaatgcccacagacttgcttacaggtcaatctaattgaagcaattcctcataaggttccttcttcaggggtgactgtagtttgtgtctaggtgacaaaaacagaagttaaaatccagaagttaaagtagacatatatgtaaaattactagaaacactttcaacaaacaatggaccccttttactctcctgttaatatcatgacacaaaaagcagtacaattcagtcttttaaaaaattgacactttaaaagatcaaagtctcttgaactctgcatccttataaaattaaaaacaaacatctgggactcactcagagtcttctgagccgcagagtgctgcgtcatcccacttctctgcctctgctgtttgcaaaacccacacaaacatctctgaatgcctcaaatgtcataagctatcccccgttactctcacagaataactcgccaagctctgagcactcaatgacttttccaacccaaagctccaaaagccttgcataatccttcttcagaacagcatagtcaggtgtgtcccagcagtatccccactccctggtgccaatgtctgtcctggtttgctctctagtggcctaagcaagccactttcttcttacagcctcggttgtcttcaaggatgcatgggctagtgctaccttacctttacccacacaagacgggctctgaagcccagcagagctcagaacaattacaaaactgaagagtcttacaacaaggtacacaagatacaaggtacagggcagtaggatccctaaaagaactaacagtgggtctcttgggaagaacactcaacatgcactcccctaatcattaattaatacttagatggatactccacacagtgtacagatctacttggggtttccagagctttgttctcctctgttgtagagccctataatccaagcaaagcagacatcttcatcatcagagggggtgaaaaggttcattgtatcctcacttaatgacccttcaattgccccttcctgaatctcccacatacaattctgacataatcgcatgcagtctcatggtcttaagaggtagttgagtattcaatgtatggaaagctagatgaagagggactccatccagctataaggatgtcatcttccatgtcgggataaaattttctggtggtgtggctgctatgatcttgtaagtgagctcttcaaagcccaataactcattggctcaccaagtagaccatgatggaattctacttatgtctgttattgatgctctgtgtcttggggaagcagatgtctctgcagggaaaggttcacatactgtgctctgcttcggaggggtgggaagaagggggctcagtcaaactggcatacacacttttctgtgttttatattaatattttccagtgcttactgcatggcttttccccctacaccatgttagttttcttgggctgtgacagaatgcttagcataaacaacttaaaatgaggaaagttttgtctagctcagtttcagttcatcacagcatggtgggatggcagaacagaacaattcacagaacaggatatcccgaccttccatagctcttccacctcctaagtgtctattcagattttgatcccattaatggattaaataattgtttaggtcagatccctcaagggactatggaatcacattaacagtcacactcctagacatgttccttaatctcctagatatttctcaagcctatcaagtcaagcttaaccaccacatacaatgtgttgcagtatttcttatccttcaacctccaatactgtggctgaaaacacatgtgaaaaagatttatctcatatggtttctgtggggttgagatttggaagtggtttgggtgtgagatagatgacccaaacatggctctttgggaggcatttagaagcttctggttgtgcctataaggtactgagtgaactgcacctatttcttctcatttcaacactggctatacacagatgatgtttctccatgaattcttaaataatttagcctttaaatgctgatctcctacttctctgggtaagtttggggctttgggtatttgataagtcaatagataagccaagctctagttacttcttgaaagctcttactataacacttatgtttgcattttaagttaatggaagaatagtttttttattttcttattctttatagttaatcatcaaaatgatatgtagttatttcaggtcaacactggtcatatgtatgcctaatatgaaactccctacctccaccttttattcttaggcctgtatcttagcatcttcattatgtattaactgaactggaaacaaggggtacaagctaatgcttcatataagaattcatataaattgacttcttaggaacaaatcccataaagtaaaagttatacaagacaactgtaggccaagactcctatgggccaagattacagttcaattcactattcattactttttctaatgaaaattcctcaaatggcctaatgtaattagaccatgctacagtaggtcatgtgtaaaatttatactctagttatagctagctcagcaatgacatttcctgagaactctgattattcatagatctcgtgtaaaagtgcagtaccacctaagagaagcatttcaaagtcttgccagttacacaaactgactttttgtacaggagaaatgccttcttgccaatagacagaatttcccataatagtaccagatcaggaagataaataatttcttcttctatttcctatattccagagaaggaaacacatttcatgggatgacgctagatctctcccctgcaaactgtcctaacaaagaccagagcttaactacaataagactatctttcctggaggagaagggctcagctcaccacatagcacctagcctttcccagcaatcaggagcatgcatactttgtgcgctgtacagggcttgcctgtcttaagagacgaagcaccagaagcaagttaaaattggattataagaactctgaatgatgggctgaggagatagctcatcgggtaaaagtgtgtagaatccttgcagaggactggagtttggtgaaccaatgtggctcacggctccagctctagaaaatcctagggccctgcagacacttagattcacatgctcatatactaaaatgtacacacaattaacttgtaaaaagtcttttcaaaaaaccctcttagattttcctcttcccgtgagaggaggacaaagaaagcacaggggaagccaccactgtgcaggtgactggaattagtgtgtagagtcacctgtatttgtcacacaccagaccaacttctaggttttctcagctcaggggaggtgaatttgctttcccataggcattatcctgcattttagcctgaccctgccactcagtttgatgtatttggattgagcagattttggaaattcatcagttttttttaacctcaaacttatcataattttcacatatgaaatttaagtggaaagtggtgacaaagtacctttaattacaaaatgtatttaacaaactattaccatatgaattttttcagggtttggtacaaataacaataatcaccagaaagccttttagaacttggaaattaactgtaaacactcaaaaattgtcttgaataatgataatacaaaaatattagggcctagagtagtgcctgtaaattgtataagctatgttttaactgcctttctactgccatgatgagataccatgatcaaggcaacttataagaagaacctttgagactcatggttctagaaggttagagttcataaccatcatggagaggggcatggcagcagtcatggtagctgaaagcttacatcttgggacacaaccataatgaagagagctaactgggaatgttatggacttttgaaaccgccaagcccacccccagtgacacacttcctccaacaaggccacgccccctaatccttcctaaacagttctatgatgaaatattcaaacatatgggcctatgggggtattctcatccaaaccactgtaaactatttctaaactacaacattttacttaaaaaagtcacaaacatctgcatttccctctctttttgttagtgttaaaagcagaaggaattctagtgcatcttaggtgctatacgcctgttaatttgtcactaaactccttccagaggtcatgagatccaaattgtcagctccactctctggctggctctttgtactccagcactctaagcttcttgatgatcttgaaccacaggctgttctttgtgctcacaaatttcatcttcccctgctctaggacaatagcaccacttccttataaacttcaataatgcttggcacatagcaaatactttaatgaataactcttctgattgttttgggacagggtttctccatgtagtcctagctgttctagaacttgctctgtacaccagcctggcctcagagatcttcctgcttctgcctcccaattgctgggattaaaggtgtatgcccctaccaccccgctaatgaatgactctcaaataaagaaataaaggggggctggtgagatggctcagtgggtaagagcacccgactgctcttccgaaggtctgaagttcaaatcccagcaaccacatggtggctcacaaccacccgtaatgagatctgatgccctcttctggtgtatctgaagacaactacagtgtacttacatataataaataaataaatctttaaaaaaaaaaaagaaataaaggtcttttgagagtaaaggtctatgatgtactaaggagctaatctgcctgaggaaatgaactacagtgggaaaggaatttggagggcacctaagcccttctatttctctgtataattactctgacatctgaaagctgcgtgcatttgaaatcatatacaacatgaacattctaagcattaatacataagggtcatgcatctttaagtcctcgtgttgattattcataactaccaacagatacttatatattagcatgtccagcattaaaacaaatcatacgtcatgtgaaaacagagagtgaacattggttaggaaattagtcaaataaaatccaaccagtgaggagcttgaaatttatttgctacatttagtaataaacacaataaagtaaaaataattacaacatataataaaatataaaaccaagcacaaatatagaaagcagctaaaatacattgaggaatatttttacataactataaatatgattcttggcattaattttggtctatttccataagtttgctttggtgtggtggttggtttctaagcctctggatataggcaaatataaaattgtttatggtttaaaactgtaatggccctataatgcagaactgagaaataaggaatgagtttttggaaagggtccatactacaaacaaagcatccaaacctaaaaaggaaaatttgcttttttccaattggcagtgcatttattttggctttcagaaattgaagtcttttaaaaatatgtattttatgtttatgtgttttacctgcatatatgcatgtgtatcctgtgtgtccctggtgcctgagaggcctgaaggatggcattagatcccagatgcacttggaatccatatgacagatggctttgagcagctacatggtgcagggatgcagggaaataaacttgcatccttgacaagaggagcaagtgctcctgatggctgagttatctcgaccccagaaattgaaactgttaacatgagccaagatcttcatcgacttctctgatgaatttgagtacagaatttttctctctctgtgtgtgtatctgtatggaaacagactcctatagatgcgttttagcatggcaagtcttgcatatatgtgaacacttatttgtttgcttgtttgtttttgttagttttgttttcaagacagggtttctctgtgtagccctggctgtcctggaactcactctgtagaccaggctggcctcaaattcagaaatctgcctgcctctgcctcctaagtgctgggattaaaggtgtgcgccaccacagtccggcatgaacacttatcttaaatgaaatgctagtgcttggaacacagctctgttggtggtgtgcttgcctctaggcctctcgggcctagattcacatacattcatgcaggcaaaaaaactcaaaaacatgaaataaaataaatatttttaaaagacttcaatttctgaaagtcaaagtgaacaaagctctggattccgttcccggcatgacaaacatgagcacactataatctagccctctggaagaagaggttcaaagtcctttcaggctacatagtaagttcaaagccaacaggggatacatgatgccctgtctataaagaaaaagaaagaaatagctgtcagttctaagtagttcagattaatagaggaggagggattactaagattcttttaagaattgggaaacacactgcttcggccatagactagtatgattaattgagctatatgacgtgttcacagcctaaggtgtaatgatggaacagcctcaggaagcagccagggaagggttgtccaagaatgaccatgtgtgcctgactctgctggtcacacatgcatatttaaatacatcactctcaaaaccaaacatgtttctacacaagccaaacaatgtcctagtctttactgtggcctgttggctatctggaacatggacatcatgagaaaggagagcttaaaacggtctttgaattaaatgtatgttcatcttatgcagataagttgggaactagagggttctagaaagcagagctcatggtaaaggtataaagcaaattattggtaggcataacttcaggagtgagagttacactctcttctgtttaactgcagtgttttgatggattagtagcaacagcaaaccatatttaaacaatcacagttcaattaaaacttgctttttggctttgtgtgtgcaaatacacacacacatatatatatacatatatatatacacacatgcatatatatatgtatatatatatgtatatatatatatatatatatggatttttgtagtaggattttcaataaagagtttttacttttaaaatatatgctgatcatatgttatcaaatctaattaaagcctaaaatgtttggaagtgaggaaaactctcatctgaagagcactctttgtgccttctttttcgttcctttatatgttggacaactgtttgtgggggacacacaggtgattctggacacttactccatcacatatataacccttagcctgaagttgctggagacttggctcaccttcagggcaagtccatccatttcaggagaggacacagagaatggcccactagcaggactaatgagacctgttgggcataggactctccactgcagttagggctctaattctgtagtgaaatttatctcatgcctctgggggctttctgatagtcatatataaagacaaaagtgaaatttggtgacaatatccccttaaataaacagtaaaacaatttgcccaagattgtgaagaaacacagtgaccataaagcagaatctcctttcttgtataactacaagcgatatgcttgctttggagacaaacatagagggcaatctcagaatgcatagcgtaagtatatgctcacagtgtaagtatatgctcacacatattcttttctttaaaacatccattataccttatgttagagctacattatgaagcgtccatttacgagatcatacaattccttgaatttgctttaaaatgtgtcagtagaagcacctggcagaacagaggtgacagtgcccagatgttaatccccaggcgacctgtgacaggcacccagcttcttcacactactgtctattgtgtttatagtactgtatctgggaagccccaaactctggcaaaaaaccagaatcactttgaacaaactgcagtaataaaatagtaagggcaaaataaagatagtttcaaccatcaaaagtgctacattgagtaaggtggctcatgcctttggtgccagaacttgggaagtagaggcaggtggatctctatgagtttgaggccaacctggtctacatagcaagtttcaggttagctggggctacagaattaaagtctttctttaaaaacaaagtatcacatagcacaaattcggtaacttacaacattctgtagagaacaattcacatgacttataatactgaaaggttgtaaatgacttatctcatcaaccaatagggagcgagttaaacatggtatatccacatccaatgaaatactatgcaaaaattaaaaggagaattgttcagtaaaacaagaggccccagaacagtacacacggttgtcttcttggccacagacaatgtctggagaaacttcatcagtgttcctagttatccctacaaagagcagttggagatgagttttactcttttagaaacttattattttattttatatgtatggctggtttgcctgcatgtatgactgtgtaccatgtgtaagcatgatgtctacagagtccagaagatggcattagatcccctggaactggagtcatatacacttgtgaaccacaatattggccctgagaactgaacctgtgtctgctggaagagtagccagtgctcttacttgctgagccacctctccagtccccaagttttaatatttgtttacttaactactccacattactcaaaagcttttacagaggtatctagctgataactgggtgatagtactgcccacagatcactatagaaactacgattttctcattatgttactcttcctaatagaatggtttgttaattttgtgtcagacattaagtaatccaaaataagaaagtaatgtacttctaagacaacatggaacctagagtagattatttctaaaaatacaaattgccatttctaaggcacatacactatttttcttcaccacacgagaacattagaatgaagatgtttaaaactacataaaataccacaccataacataagtaggaatagaattatgtaccttttagctaattcaaagcatgttgaaaattctactatctataggaagaaatagcatttgaaaaagaaaaaaaaatgtttttctagttggctcttaaagaatctgaatgtatgccaatagttttatgtgaagaatacttgtggatgttttagcaatgtgtttgttcttagaatagaacagatggcaacaaggaataaaatgttatttccagatgtataattttgtgaactcagtgccagggacccaacgtgagaattaagtctgaagcgtaagtgtagctggcactgtggcattttgagagtagactttaactcgatcatctctgggctccacttaaggtctttattcaggtcatgctcaagcatagagacatgttagtgggatcatgttccttccatagtcacactgctgctgtggctgcagtactggtgctagattccgagtctgtgagaccccagaactaaagagaagagagcctctatgtgtgtgtgtgtgtgtgtgtcctttctcaatgccattcctctttgggaatacataatgtaaaatagttgcttgtacacaggacgtgctgttcctatttccttgctaatttcagcttagcttaaatctctacataagtaatttaaggaaaataaatgcactcacgtcactgcagtcgcctggtggacagtctccgttcacactgcttcaggaatgttgagggaagtcctgggttttgttgtcttggaaacctgtattgaatcgaagaacaccattttgttacaaaccaactatattagtaacagttttgcttcttgagagagttggtctctctccttaaaattctttgacaatttcttacacgtgtgtaataaattttggttattttcatcccggtactttttcaaatcttccctcttccaccaaagccctttaaaacaagtcctgctcctaccttgatagctttattttggtgaccaactgagtttaattttggtgacttccatgagcatggtggagagttattggcaagtaattacggatggaaagtttatctgtgactacaccaccaaagaaaatggcacctttcctcctagcaaccatgactatctcaaatcctctcacactgggtgggcactcacgagtgcttccttgtctatgctgaaatgtcggtgagctcagacttctgcatggaaccatggctacagtgagtttgtgggcgcagtggccatgccatgtccagacacactgcttcacagcactcgcaccacccagctctcacatcctttctgctcttttcctgcaatgtttggtaaaccatggaggtttaggatggagcagagagggctttcttaattaccatgtctctatatccacttgggtaagttatttacattcgttttttaaaaaaatacatttatttggtttttaaattttatttttatcttatttacatttacttttttttttttttttttttttttttttgcctgcatgtgtgagggagtaggatcctctggaaaagaacttatagatggttgtgagctgccatgtgggtgctgggaattgaacctgggacctctgaaagaacagtcagtacccttaactgctgagccatctttccagccgcagccccttatttaaggttgtaaaagtccagcctagcgtggatttccccagcttctttacctgcttcttagaactagattgcctctggtgtgccgcactggaacgacgcttcgtagaagcccttgaagcctgcagacacaattcctgtctgaggctgtgggctgctttgctttctattgggctgtgctcagcggcatcggcttctggaacctgattcgctaattgttgctgttggagttgggagtcttcagtttctaattctgattcaaaaatgtgtggctggcttttgagttttagagactcgtggcttttccccaaaatttgtgtgatgaatctgcttgtgagattgtcttttccaccagtgtggatgtcaacatcgtttttcatcactgctgaactgttacttgacgcctgtgtcacggcgcgagtagacaatggtctagcttctctaaggtacacagtctgtctcgaatcagaagagggctgttccttcttccgatcatagaactcggtgcctttttcttgcagaggtttggagcccttctgatttaagttcccagcaagtactcgaatgttgctatttggtcttttccgagaggctgtgggtttgcccccctgagtaacactggtttcctgtgctaatactgtaggttctgtaaccccgctctgttttcttttcaaggtgctaagtgccgagatgtttttgttcacttgctcagatttccttttgaaaactggtatgaatgcaggggctctgttactttgtatgcaaagagttttgctcccaacttgtgtattttctctgctgagttgggactcttccaaatgaagctgtgatgcctcgagaggccaggaaggctttcggtcgtggaaagacccagactggtggcaagcagctgagaacaagcccgacctctgctggctgacagcaggctccaccttgtgctccgtggctgttgactgtggcgtgacatttagagctctggtgggtttcaccaatgtggcttgagttagagaagctcggaagagttttttagtggtcagattggatggtttgactttgttttcctgaaaggacagagattagggaaatttaaagatgtaataataatataagtgaaaagagaaaagaaatataaagtattggaataagaatacaaagtaacactaaaacacatggaacagctgagaaagaaaatataactgagccgtctggtgtaaggtgtatatttatcttggcacatcataacctgaagtcaaccaactgtaaaacttacacacagctaccatctgtgtctacactgttttccagatgtgcttgggcaagctcctggctcccagtgctccccttcttatcactgctctaagctgtagcctctcctctctttaagtctcatctcccatgaacagggtgaacagggtgctctgatactttagtgtccgtgtcctcccttcctgaacagatattggcatcttggagtgaaagaactatggctttttactctgaccttttctaaagttactaagaaatacttgctgaaaaacctctaatgaaagtgtggattcatttgcatgagatctttaagtgatatttttgacttcaggcagagctgtgtgtcttaggcctgattgttttcactgtctgctacagtctctggtgcctagcagtaactcagcaagttgtctaactgactagtaggatacatcttgcgactgagtattccattggcggtctatgacagtattcttctctgtccaattattcaaaatacataattttagtattttgaaataaatctacactggactttagctttttggaaagaacagttgtgctagttaattcgtgtcaacttgccacaagttagagtcatttgggaatagaggatcttaattgaggaaccccctccatcagaccggcccatgaacctgtggtggaggtattttcttgattaatcagttgtgtgagggtccaggcccttgtgggtggtgccactgctgggcaggtagtcccaggctatataagagagcaagcttagcaagcctggagaacaagccagtgtgtacgatttccaccgtccctgcctctgctctgacttgaattcctgttctgagtttcctcagtggttgcctattactcagtgggtcaaacattcctctgctgccatgatgcttttgttcatggcatttatcaacagaaggtaaaacgtagaccatatatgtaccttcttacccttacagattaaaaatatgtcacaagcaaaaatgtaaaagttatagaaataatatgcaaaccagaatagttaatttgtccttcttcaaccgagtttcagtttttgaaagaggctgagataagaccaggagtttggggatcaaaattataatcaggaccaggagttttgggatcagaattataatcaggcacagaattataagattgacccaattatctactcggcataacaaggcacataaagatgaaatggcttaaaattaagagaaaaatgggacttcaatatatacactttaggggagcacaattcttacgcttctgaagaataaaaacgggagtacaggtgttcttcagaatagactctgtacaagggaactaacataaaactaaaagttgtctaataaaaccttgcgtagcattttttgtcaagacatcagatgagcaaggactaccaccatcatctcaggtcaagaaggaagggcatggtggactggtgctaaccctctgttctactctactcttcacgttggtcttctggaacaagctcttataaagcctgaaatgtcattttcttatttgcacttagagtgttgactttgtgattgcctgccacacataatcaactatttggagacaacacctgtgtctgctttgctaaaaagttcaactataaacatgttgactgagctcagccactaccaggcagaaactgcattgtccactcactagatttctgggtgtccagtgtagacagacactatctgctcatctgctattggagactagcagataaccaaccaacatacttccccacagactgctgtccttgtattatacatgctacgtaagcacacagatgccatcataagaaagatcactcaatttggttgaaattctaccaaataccaagagatatttgtcaaagctgatggagttactctggagtgcaaatgttttttcctttgccttgaaagaaacataagaaagaactaagttgaaattaattattaacaatcaaagaacgcttcctttttaaagatcatacagtttctgaaactgtatgattttttaaaaatgcaccttattcattgagatacccaaagaaaacctctagacagacttggataaggacaaattgcttgcattctgagagaatgagtgtctggcctgcgatctgttacattcatggcagctcttcctcgcctgtctgagaagtgcgtgtctggtgagaagagttcccaggacactgttctgctctctaggttggcaatgtattatttattcattgttttaatttttaaaatactgtacatagccaaaagggaggaaacttttaggtttatattcaaaatgtatagaaaaacaaaagggacatatgtgaacaacagatgagatcctaaataattcacagaaatcttttttttttttctggtgataaaagaaacttttttttaacacgtaaaataaagatatcaatttaaaatcttggtacattttataaaaacaagaggcaatgttgtaataaaacagcagttagcctcagctagcaacatactatttgttaaccctgtgcaacaaaagacttttcatactacgcttactcaaacatgactaacaattcctacagacatttcaggagtcttcactgggctcctacagacttgctgctaaaaccgagacgtttacagtcataatgtgccacaatcacttgaaaacgtcacttctaataggaaataatgtagttgtcactggaatttgttttaggtattcaacagctgagttacaaggactgaaaagcactctaaaagcccatgtacactgttgtccacacccttcttcagtacacactgaactggtttgacacacttctcttcatacatggcaagcaacagcacccaataaacgcctgagaagaaatgctgctgaattcacagaactcttaagtgctccccacattgcagcttcgtgaagccatgagctgagtagtaagcatatgctttgctgtacatatcatgtgtctgggccattggaagatgaagcttggttgacctctactttctagcactgacatacaatatataaactgaacgttttacagatataaatggtggcccactattaaggaatctgagaagtctaccatttacctgggcaaggtgcttagatttttactgagggagaaagtccttctgttgcatccagacatgtgatgtagggaaataaggacagactcttcttccttcctgttaactgttaaaatatccatatctatcagcatgcctctctagatagattgtggcaaaaagagatatgctaaggcttagcaactcaccacacacacacacacacacacacacacacacacaccacatacacacaacaccccactacacacacatatacatactccatgtgattgctatacctggagataaactaatccaaggtgtcacaatcttcttatgctagcagtaacaggcagtgctgcaaaacgtctggggaagactgaaaagcaaccagaatgactaaccaaaatttcacaatttatttgagtcaggtgtattcgtggcaccacacttgtctatcttgcttaaggcagagcccctggcttataagacatatggaaactgaaagactatattagctttaaatgacataacacgcaaggaagcaaatgctcaaatccaaaatgtagactatgctcctgggtaagtgccctgtttctagcagacggccataaataatgctgtataataaaacagattacatatataatgaccaaatgatttgaaatggtcctgtttacattttaacttaacaaaactcttaaaaaataaatctttgtgataaatgagagccagagcatgacctgtgcttggtgatactaaagaattatcattcattctggtgggtatagcaatgacattgggacatgtaaaaacgctttaaaaatgatacatgtgactgaagtacattctacaagctctacataagatgagactatgaagtatgcaataagtagtccatacaaaggcatgatgtaagtatctatttagcaacaattccttagattggatttggcaagcaatcgaactttaaacaatattatgccagctggatatggtggcacatgcctttaagcaatccctgtgctcaggagataggtaaatctccatgagctcaaggccagcctagtctacatcgtgagttccaggacagccaaatctgcatagtgagaccgtgctcagaagaaaagcaacgcaacagttatgtaaaaccagagactataatacagataccaactaaggcatctgtcctctacactcccttttcaggaagtgcccttgtctgtagccacaaatgctcaacttgaaaacttttgcatttcagtggggtggtccttgaccaaaaatacagtccacaggctggctagtgacaggtgatgtgaatgtgtgtgaatgtgactagacctgaaaagccggcctcagctggggctctctagagaggtcagtggttaagagcacctgttgttcttgcagaagacccagcttctggtcccagcactcacaagccagctcacatccaacagcaacaagcatgtacacacacaggtgcacagacagttacgtaggcaaaacacacgtgcacacaaaataaaaagaaagctaaaggaaatggcatggggtgtggtgcttggccacagagctcagcacaggaaggtctaatcagcagggcagagggagccacagtcaatagaaaccagctcaaaggaaaacagctgacccatagcatagtcacagaaagagagggtgacccatagcacagtcacagagagattgtagccatgtgagctcttggctcctggtaggtttccaaatagagtttccagtgttggtgtgtcctatagagcacagcagagtcctcctggctctgagcccagtaacagagaggcgctctgcacaagtacagcattagatgtcagctatgctccagtacagaaggcactcagtagaactccaggaaacttgatgccatacaggagctttcccacaatatgctcacggactcatggggtttgaagggaagacaatgctatcctggtgccaggctacagcgctctcagtagagagcgttgaataaaatccggcagccccacagtgattcttatcatctaagctaacaagctgagccacatataatgtacattgtcaacttcaagtcaccaggaatataagcaattccaaattctctatttttctgttggtggtggtggtggtggtgatggtggtagttagtgtgtgtgtgtgtgtgtgtgtgtgtgtgtgtgtgcgcgcgtgcgcgcgtgcgcgtaggttcttatagcaccgtgaggcattgggtccctaaaaatgtgcccttttaactactgaggcatctcttcatccctaagaaagatactcttaagaagtgaagggttcaagagagaaatcaatggaaatctggaaatattttgaaataaaagataaataaaagtttaagaaaccattcatgacattaaaactatcaaatgcaagatataaatataacataagtacagaactttataatattattaaatttttttttttttttggtttttttgagacagggtttctctgtatagccctggctgtcctggaactcactttgtagaccaggttggcctcaaactcagaaatccgcctgcctctgcctcccgagtgctgggattaaaggtgtgcgccaccatgcccagctattaaaatgtttttaaaagtatatttgaatgcagaagagatagtaaagttcatagataaataaatctcaataatatctgtggttacacctatatacatgtatccaaaagtaggcataagtcgacaaactgaaatgagatgtctacagagatttgtggatcagggaggtattactgtaggatactgggggaaagaactgtcctttcagtgtcattggttggacaaacagatatatatgtaacaaagaaatctaattaccacattacactatatacaatataaattccaactgggtgtttgtgtgacatcatggaaaaaacacaagattttggaatgcacatgcattttttaaagtgagacaaaagtatggctatcataaagaaataccctagtaacttagactataaattaaaactgctattacaaaacaccattaagaggaagaaagcaggctggagagatggttcagcatttaagagctccgactgctcttctgaaggccgtgagttcaaatcctagcaaccacatgatggctcacaaccatccataatgctatctgatgccatcttctggtgtttctgaagacagctacagtgtacttacatataattaataaataaataaataaataaataaataaataatagagaaagaaagcattttgcagaatggagggagacaaagtgttctacatagttgataaagaacactatgtcagaatacctataaatgaaaaatggtagacaaaccttcaaagcagatatccaaataaccaatatacataattaaccaaatacatgaaggttaaaagcacatgataatgagcatgtctgctagaattgctgaggtagagattgacaatactacatatgaacaggggcaaggagcaacagcaagaggttcacaagacactgcaaccactttggcaggtgcctgtcatgtgtcctaaacttggcatacaatactgattctccatctatgggattcatgtccacaggcctagacgatgtgcactgggatgctgaccaccacattattgcagttagcactcaaacaatcaaactgtcagaaacaacattctggtgaataaaccaactatggcatcattatgcaactacatgggaatgaaactgtatgaccacagcttagaggaacagcatggattagtgtcacaaactctattctaaagcaaagagtcacagaaacacaaacacaattcttttatttgcataaagttcaaaactgggcataactaaaacctaggttttttctttttttattagatattttcttcatttacatttcaaatgctatcccctttcctagtttcctctctgaaagtcccctataccttcccatgccccacccctggtccccaacctacccactcctgcttcctgaccctggcattccctatactggggcatataatctttgcaagacctagggtctctcctcccattgatggctgactaggccatcctctgctacatatgcagctagagacacgagctctgggggtactggttagttcatgttgttcctcctatagggttgcagaccccttcagatccttggatactttctctagctccttcattgggggcccaatgttccatccaaaagatgatgtgagcatccacttctgtatttgccaggcactggcatagcctcacaagagacagctatatcagggtcgtgtcagcaaaatcttgttggcatatgcaatagtgtctgggtttggtggttgtttatgggatggatcagtctctggattaaaacctagtttttaacgctgtatgcttagtaaagaccaagaacacttcccaggacatgccatgctagcttctgaacacatttgggggttataatagggagagtgagagcaggatgctgcattggattgcatgaataattacgcaacatgcggtatgtgtagacacaaggggttgtgtctaggctcactgctttgttatgccatgtttggttgataacgctaggaagcctgctcttctctgaaggaaaacagaaggagtgtgcctggggatgcttgggctgtattatacaagatcaccccaccccacccccaaagccagattctaaagctctcttcccctaagaatttccagccctagcaaacaaaaactcagaatctgatctcgagttgtgtcttcttccccatttccactaaatctagggtgcaggaaaaaacaaacaaacccaaacccaaacagccatttcttctttcacttctctatctgcagggagccagatatgctggtttactgaagccaggccagaggcaaccactgttgactgcttttcctgctgtgggtttcagagaagtcctctcctgactccacctagtgggtagcaggcgcccaacagctactgctaaggcctgtacccatagttcatctgtccagccgaacacttaacaaaactctttttaacctccaatagccccgctcatgagtatctagatatgtatggaacatatctgaaactactgtgcactgtatgagacacaataatatcacatggcagggcaaacaggtaagtagcagtaacaacagacaacacctgtgagatgctagactgaggagggctcatgagaattcgagagacccaaaaaggggtgattagtgtgccccactgggtgagatgaagctctccttacctgcagaagtggtctggttagctcctgggtgtaatagcatggcttatttgtcatctttatgggaaatccacataaatgtggcagttttgattttaaatctgaaaggaagcttttcaaaacaccatccaaatccactcttgggaagaactgaatgggctgacttctgatgcagctgagagggtacctgagcacagttaaagaacaacgtgaagttttctgtccgcaagacacagcagttctcacttttagaaaggcagtaatgttgacaggacggataaacactttctgtttttatattatagtctacagatgccaaagccaaaaggctttcattctattttaagtttacttttattaacaaattcagtgtgtgtgtgtgtgaatcattgtgtcctcattacgtaaatagaaatgtaagtagagtagattacaatgctccacaagagattcctaacgaatgtgccatcacctgtacagagtataaagacaaaatagcggacaacaatctgctcctggcttcaaaaacaaggaaaaacttggcaccgtgaagaaacatcaccaattattttcaaacttcaaaagcagtccttcaaggacagtgtcttttccactgagaaatctaaccacttggaatagtgttggcgcctaatgaaaggcaattgctggctggtgccgactgtaggcttagtgtggattgtctgggttaggaaagagcacagggagaacacgctggctcttctgtttctaaatcccagagtggtgaccgccgtgctaagtggcttaacatttaaggcaatgttaagaaagccattttcctcagttaatgaagtctgttttaagtgcaagtcaaatctactgaaagggaagggtaacttttaatttaacccttcaataacatccaaagaacactggggggagctcttggctaaggagaaacccatgactggtttcttacagcccattaagaagtaaacatgcactttttttttttttaaattattattctgaattttctttcctggtctaagttttttgcaatcgtctttatggaaaattccttatagccttgaatggtcgtaattccagcactgaggaagctgaggcaggaggatggccagttcaaggatagcatgcgttaccttctcaaccccattcctgacaccagcatggtttcatattagaaacaattaagctatgctgtgtcttttattgaaagatgagagggccagaatgcagctcagccatagagtgaacgcctatcttgcagcaagtcctcgattcaatcttatccttggcataaactggacatgtggtgtatgtctataataacagcacttgaaaagtacagacaagaacatccaaaattcaagaatagtctgagatatctaacaagttcccggccaggctatatgagatccaggtccaaaacaaaacaaaaacgcccaaaagaaacagcacaaaagttcttattaatcataccctctaagctaaactaagcacacctgtgcagaaaaagtggctccattaaagagtgagagcatgataatgacagcatgagccatggccaaggtctggctcatcaggcagacagaaagtatctgctatcactagtgcacaaaggatacgtgaaggtccttttgttaatcattttgaagtagatgctgcagtatattttcatatctctacggtcttctggaagtttatagccatactataaattaagcacacaatgtaaatcattttggaggaggctattcttaggttacatggcaagaaaagagatgaaatgaaagttagtgtgacacatagttgcttcctaccaggtcatcccagtgcctctggaaatcttcgaaggaatgaaggggacagtcagggggtgcagtatgaagaatatttattatctgccccattttcatactatgaaaaatgaaatttgatatattacatcaatgcttaaatacaattcaatgttatttgataagttgtgatttataaagtattccaaaagacctagcaaatatattactatccaaatataaacaacaaactaatcacttttaccttgttcaaaatacaattgcattaaaccttttatcttacaatgtatattttaagatatagttagcatgctttgaaatacaaataagctgtggaatcccataatcaaattaacatatacactagttcacatatgtacatgttttgtagttaaaatacttaaaatctatttgtagagatttccaagaatagtctttgatactaagtgtaaagtgttgtataatggatgtttttaacttattcctcatgtctgagattatcattaataagcacttcttgaatctagtccaaagctccagcctaccctttgtaactgtaattatactgtttttatgagttcaatttgacagatactacatataagattacatgaatttagtcgggcatggtagcgcatgccttgaatcccagcacttgggaggcagaggcaggtggattactgaattcaaggccagcctggtctacaaaagtgagttccaggacagccaggtctacacagagaaaccctgtttcaaaaaaccaaaaaaaaaaaaaaaaaaaaaaatgacatgaatttgtctgtctaacttaacttattttacttaatataacttgttccaggtttattacccatactgtcacataggacaggatggccttctttgttaaggctgaatcttgctacattgttatacaaaccacatcttcttctgtttcacctatagggacacttaggttgtattcacatttcagcaactgtgaatggagccgcaaggaatgtgagaatgcagaaatatctgacatactgattttatttccttggatatacatcatatatctattattaggattaaagatcatatggtaattacattttaaaaattccttttacctttgtaagaaattccataatgttttatccactatttgtactaatttacattctcatgaacagcatgctggcatcccctatacatatgatatctatatcacttacattattttttaactttaaggatttcctaaccacattgcatttctgtcctttctaccctatctctgcccctccctcaactcccttatcctctcaaccctccctgatctcttctctatttgttatatgtgtgtgtgtgtgtgtgtgtgtgtgtatttaaagactatatcacctactgaatccaattaatactgtacttatttgcatatgcttactgctgatgctttagaactaaaaaacaaaacaaaataaaaacctccaaaactggttctccctccctccgtaggcctttaccacctacagccttgcatatagaggtgggacctcgggaagttttcttccagtccaccctggtgtgttgactggtgtggtccttgcaggctttgtacaggcaaccgcagtgttgagagttcatgggtgcagcgctgatgtgcagaagaactcccagtcctctgtttctaacaatctttccacccaaatttccatgacgttccctgagccaggaacgtgttgtgttacaggtttccctttggcggctggggatgcaagtcccttattctctgtgttttgattggattatggatctactggtctctgatgcagaaagcagctgcagttattatctctgggcatcaggatgagtatgcagaagacaattagaagctttattactttaacaatgtgggtcccttccagctataggttcttgggtaaatttacagaaccaggcaggagttttctgatagctgcagttctgattagaggttgcttggttgccttctggatacaagtgccactatggcattgatgtcttgcaagccctgtgagtaccgagattctgaggctttatagttgggtaggactcttgataacttttctccttaggcatctggcatagcaccttctaacacatggcaactgcttcagggagtccttctgcagccaggagcaatggactcccggatcactcaagagaagtagctcctgcctgacactgaggtttttgttagtctaaatctcctgggggggggcattacactgctctgaggggtaactgcattaggacatattctctctatctctatatatcatatgtagaacacacacacacacatatattattatatatatataataggagtggcactattaggagctgtgtgttagttggaggaagtgtgtcactgtaggggtgggctttgagacagttctttcctggaagccattagatcaacatatagaactctcagctcctcctgcaccattcctgcctgaacactgccatgcttcctgccttgatgataatggactgaacctctggacctgttggccagcccaaattaaatgttgtcctatataagagttgccttggtcttggagtcttttcacagcaatggaaaccctaagacagacagacagacaacgtaagcttttagttttataaattcccatttgtcaattgttagaactaattcctgggccaatggagccctagtaaaaacgtcattccctgcacctgcactttgtagggcacagcctgttttctactagcaattgcaaactttcaagtttctcattgaagtctttgatttgtgtagagctaattttgtgcatgatcatagaagcgaatctagcatccttcttctacctgtgtacacccagtttcctcagcaccatttgtggagaatgctgtctttccttcaatgtgtatttttggcatcttgatcgaatatcaggtagctcccactatgcacatttgagcctgggtcttctgttccattccattgatcttcatttctatttttgtgccagtaccatactgtttatattactattggtgtatactataactttaaatcttgtatggtaagccctccattattttttaaatacaggattgctgtcatcatccacagttttttgtactttcatatgaaattcagagtttttgtgtctgtatgccatataaagtttaattgagattgtatggaatctgtaaactgcacgtgggataattattttaacagaattaatcctactaatccatgaatatgggaggtctttccattttctagtgatttcctccatttatttattgagaaatttaaagttttcattgtagagatctttcactttcttggttaggtttattctattctttccccattttgtttgtttgatttgaatatactgtcaatgggcatgtttctgttgttatctttctcagcacatttgctatcggtgtgtagaaagatgttaatttttgcaagttaattttatatcctgccacttgctgaaagtgttgatcatttttaattttctggtgcagtatttaagatctcttatgtataatattataccatctataaatagggatacttaacttcttatttgtatccctttagtttccttctcttgttttaatactctagctagggcttcaagtactacattaaaaagaaacagcaatagagcacatcactctcaattttctattttaatgtggctgctttcaatttttttcaatttaggatgttggctagtgggtgtgtcattatatagctgttattatgttgaagtgtgctttccaagttctactctctttaggacttttctcatgaaggcatgttggattttgccaacatccctttctatatctgtggatatttttctttttaataataccatttataacagatatgaggtgatgtctcgtgactttactttggatttctctgttattattgccgaagtttattttcatgcatttattggccacctggatttcttttttttttttttctatttaagttgggtgtagtggctcctgcttttagttccagcactcaagagacaaagggaaggtgaaattcaggtctaatagcaagttctagaacagccaggcctgtgcagtgagatcctgtcttaaaagagaagaagaaatgtcgatttctttgttcatttgaaaaccaagttgtttcgcgttactgaattgagtttttctatgtgtgccttgatgtagatggagtgtttgctcagtcttaaatttaattaacactgtaaccattttaagatgtaattaggttgaaaaggttctgctcacaatgagtgtattgatgtaattatctcaggcttgggttccttataaaatagtaatttttgctgttttgtgtgtctttctgatcctctctttgcctgttcactggggaatgacgatgatgaagaaactcttatacttaatgtgctggcaattggatctcagactttccctcagacttatatgggaaatgtttgcattgcttacattgcagtacctggcattctattctagaagcataaaatattctaaaggaaacatggtttagaactatttttgcctccttcatgggtgattctcattcttttgacttttctttggtttgcaaaagctttttagcttgatgcagttctactaatccatttctacatttgtagtacaatgttttgaacaatataaaaaaaaactcaccctcatatcaaagtcacaaagtttttctgtatagcaatatattattatagttttgtacgagtgagaaataaggatctaatttaattattctacttgtagatatacagttttcccagcaccacttttggaaaagacaaccttctttttttgtcttcatggaagtgttaatgaaaattcattgatcataactacatacctacaaacatgctgttttgttctttaagtctatatgcatgtgtatatgccagcatcatatggttttaattactgcaagtttgtaggatagttcaaaatcagagtgtgctgcttctgagattgctttaactccttggagccttttatttctatgtgaaattattttttccctagtttttgaagaattatatgttttggttgtgatttttggtggcaaatacataacatctatagattacttctggtattgtggacatttttacaattctaattcttctaatccacaactgagttctcattccaattatttgtgtctttgtcaattccttttagaaatgttctgcaattttaactttcacctctttggtgagagtcattctacagtttcctttgggtagatatggtgaatgagattgtttccatgttaaagtataggaatgctgctgggttttcctactgttgctggtgtttagagacacaatcttgctatgtaatccaggtttgtcttaaattcactctcctcctagctcaacttcccacatcctggagttacgagtgtgcaccacagatactatgggtatttacaagctgatcctgtagcacacatcttttaaaatccacttcctagttctaggttttgatggggtacttatggttttctatttgtagcatcaagttgtcggtcaacagaaatggtcaccttcttcctctccaattgcaatgcctttaatcttcttctctttcttcctgcacaggctagggcttccgatactatgttgaatagaagctttaaaagtggaatgcttgtcttgtttatgatcttaacttccgttaaccttttaccatcaaaaatgaccttactgtgagcttgctatgtatgatctttacttgttttaaatcttaataactgaaatggtgaggaaacactgagttgaactgctgcaaacaatgtgccaattacaaatacacaaaaagccgaattacaaaatgcttccaccagtgagagtctgtgaagaagtaaatgagtcagaatcatgcccttccccctcaatagtttaccatgtgaaagctcttaattttcctgagcaagtttaaatttcttaatggtttttgtctcaataacaattcactttttttctaatgataatacaaaaatatctgtttacatttaattataataaatcattattaggtagaaaatcataaattttgatattaagactattatgatattgagaaatttggtaattttagtattattaaaagatctaacaaaaatgtaaatgcaaaacaaattatttttgtaattcaaagggggaagagttatggctgctgtttccataacgaacctgctcaagtactttttacttttgctctttatgtatataaatgttttgcctacacgcgtgtatgtgtgcccatgtgtggctgctcaggaggccagaagacaccaggtcctctggaagcacgtgggtgatgagaactgacctagggtctctgtaagagcagcaagtgtccttcattagtgacctatctctccagccttgctccagtattttatagtgttataattatgtttttaaggttcaaagtagtttatagttttgcataaagtgttaaggaagcaaatgtagaacattattaaaatttgaatccactcttgatggttaatcttcatttttcactccactgagttgagaatttcctgggagattgctgaggaacacttcctggtatctctgtgaggaaactctagaaaggattacctgaagattcgcccttagtgtgggaatcacattcccgtggcctggagacccagacagaataaaggggaaatatgaagcctgtcaagccttggccttctcttcgcctttgatgacataaactacgctgtctcatcatgacttccccaacatgatactttgaaccaactaaagcccaaagaaaccttccctcccttaagtgtgtccctaagatatcatggttacagtggtgaaaggtggccatcataccagcgccacatcactacctcagatcttacctgggcaaaatgtagcaccagttgcttaaaatggaatgtctctcaatgacagcattctggttggtatgaaaatcctctataatacgctgagaaatatcaaactcctgtagcttttaattgaaaaagaaacattaaaacaatacaaactaacagtggtttagaaatgttttagagatttccttctttcctgaaccatgtatgtatccacttttcatgaggtaatcagggttccaacatatcccacctctccccagcacagtacgccaactaggttagattatgctttcctgttcatcttccaaaccctaacctgtatcttatgctagatccaatcaattctgttatgttaacttatagaagtcaaacccatctaaaagatttgtatttctgtgaatatgtttatatatgtggagatgtgtgcatgtgtgagagaaggccagaggacaactttaggaatgtacttctttttctttttctttctctttttcaccagccagaaaggccaagagatctactacttgtccctgttacttcagtgctagcactacaaatatgcaccacaatgccaactttttaaaaaatgtgtatgtatgtagagaagttgattgcctaggaaggtcagaagagggtgtaaatgttctacagctggaattgtaggtgattgtgaacagcctgatatgaatcctgagaaccaaattcagttttccagaaaagcaataagttcacttagcttctgagccatcacatttagcctggagaggtgggtactttgatgtgatacactgtgcttgagaagtctgttcctaagctaagctatgagaaaataaaaggaagaaggacagtaggaagaaagaagtagtaaataaagatggccagggcaggagtgtgcccatacactgtaccaggtagaatggctggcttgagagaaaacagaatctgaaatgcaattctaaagtcaggcaataaagtgaaaggcttagaatgtgtggattctcacatatatctacttacatagcttaagtacataccaacactattcagaggctcaagccacactagtccttatcaacgtagatcactctgaacactaagaagttccaacgattaacatacatctcaggagaatactaacccttgtatttatcacttcagaaaaagtatccctatgcaactagagccaaacccctgagaagatacccataagtgaatgtttcttctaccttacaacaacagcctaaagaatctgggtttacttttctaagcaatgttgagattttacagataatttgggttggggaagctttggtttagaaataggaatctatcgatactgtgaagaagcaagactgggaactaggcccatgtggagattagttaaaaggctgaggcaaaaggataggtccaaatcagaagactggtcactgcagaaaccaaggcaggtaacagattagagtggaagtgaaaaagagaagtaccacagtaaccacgaagtctattggaggaaacccactgtctttacttactactgtcctctgatggcaaaacagcaaatacagaggaagaagagatctgctgaggttagtggcacacacccccttttaggtgtcatcaaatctggtgtgtggtggtttaaatgataatgtcccataagctcagatgtttgactacttggtcaccagttggtgatgctacctgggtaggtttaggggatgtggctttgctggagaaggtaggtcactcagggtcatctttgaggtttcaaggagtcttaccatttccagtttgctctctttgctgtacttgtggttcaatatgtgaactctaagttttctgcctgccactggctagctcaactgcagaaagcagataaagacttgagtgaatgtgtgttgataacccaagcactgtcatgtcaaggactctaaggactcagacatagggaccttcatctggtccaagtacaagtatttacgaacaattgaccagtgtatgaagaaactatcaaacacagctttctccttcaggatgagagtagcctgaaactgctcttacggagacctcctactgagattaactaaaactggccccttgtacagctgcatgccagagacccaccatgtactggctagttttgtgtcaacttgacacaggctggagttatcacagagaaaggagcttcagttgaggaaatgcctccatgagatccagctgtaaggcattttatcaattagtgatcaagggtgggagggccccttgtgggtggtgccatccctgggctggtagtcttgggttctataagagagcaagctgagcaagccaggggaggcaagccagtaaggaacatccctccatggcctctgcatcagctcctgcttcctgacctgcttgagttccagtgtaagatgaacaaacccttttctccccaactgcttcttggtcatgatgcatgtgcaggaatagaaaccctgactaagacacaccaccttgacacagatgtatagagtaaatgctctttgtttccaggttcctgctacagttggtgccctccattagactgagtacagcccatcagactccacctgtcttttctgtgcatgtgtctgtgtttgctctttcttctttcgtcacctcagttaggtcagttcctgaagctgtgcagtgtgctgtgctttgctctccgatcgtggactctaaccctttggaaccataagcccaaatacactcttttgaaagatgccttggtcaaggtgttgtatcacagcaatagaaaagttagtgatgcagtgtgtcatcagtacagtcacgagaaagggtcgaaaaggacacagtcacaactacgcaagaacatgtaaaagatacctagtgtttaggctgaaatgaaacctagaaaacagtgaaatacaagtggcaaaagatagagaaaagccatgtatcaataggactggactttggagaaagcagtttcaggaaccaaggaaagagatgaggctttaagaactaaatggtacaaaatagtgtacacgtttcaatgacatcgaagtcaaatttgctcagacatctttcatctgagtcttaaagtaatacagctcatatctaactctaccactagccaatcaacaatctttaactattgtttttattcaatatatatcacagataataggtatctgtagtggtatgaataagaatggctcccacaggctcatatatctgaaagttaccagacagtgaaactttttgacagtattagaaggattaggtgtggccttgttagaggaactgtgtcactgtgagtgggctctaaggtttcaaaagcccatcataggccaactctctctatctctgtctgtctgtctctctctgtgtctctctgcttgtgtatcagggtgtagctctcagctacatttttagcactgcacctgcttgctaccatgctccctgatgctgctaccatgcttcctgctaatggactaagcctgtgaaactgtaagcaagccctcaattcaatgctttcttttataagagttgccatggtcaaggtgtctcaccagagcagcagaaccgtggctaagacagtatctaattctaccaaagggcacccaaatgtgaccaaggaaactggctaagtagagaaagcatgatactgagcagtgttgaaaggaaaaccctgaatcttgattctctcactatctttgtgacctacaacagctacttaacccatgtctcagtttgctcagctataacaattttgatcttctgttctgtatctacgccataggaagcatttgatgtactttacctccttaacccgctcaaatctgtacaagctatataccattctctccaatttacaaaatctgagattaagcgatattaagtagaatactcaaagtggctctgttattaagtgaatatttgagaatgttaatgtgatttgaagccaactctaaatgttttagttacacaaatattaaggaggattttgtatctcatctttgtgctggcttttcttctgaccttaaaaaaaaaatctttgggaggaaacactttgtacacatacttaataatactcaataaataactgactatagaataaacacaaatttgtttccaggtgcttattttccatataattaaaactttaagacaacagttaatattatgtcatgcctttctgaaacatgcccctcatgtagttacagattaaactataatctgaatgtatcaatttgtggcagtttatacacacacatttctatctagacacttatctgagttttataaaaatagtatagtttaacacagtctgaaaatggagaaattactattactagggtaaatgtgtggattttaattacaaaaataaggtctgaaatagcacttcttataatgaatcatgataaagtatctttaaaggttctctaaataagatcaaagatcagtgttttttaaaagaaactactggaataatttaaattagaaggtggtttttcaggccatccgagcttcagttcctaaaaatttcgcagcagtgactgacaagtgttgtgtagcttctatgaaaggaaggtgagaaagacacagagcctttcctctaaaacttcccagcataatgatgcactcgaataaacaacagtgtgaacaaagagagatgaaccgtgcgagctgcgaggtcttcacaggtggtgatgatgaattacgtcatgaaagatgagctggagagcacataccgagagctcaaagaacagttggaactgaaacttggaagaatggaggactgtctgccttggagacgcagttaacagcgactatcgggaagaagtgctgctagatgagactacatacagataaggaaagcttggatccatctgatgaggacctcatccagcataggaagcggttgggatttcattacatagtcactggagaacacagcacacttttaacactgggaagagatgtgtacaagacaagctggagtggggagtggcacctagcaacaacatctgtcaccccataatcaccaggactgactaggctgactgattgattgattgattggctaggcaggtgtctccttcctccctcaccatttaatgtgtgtcctaccgaaagcttcacgctgggctgagcagcctttactgacagagagaagctctctttggccaagggtatgagtggctgtgctctctaatagaacttccagagaagtgtttagctcagcaccattagcactttgtgtcaagtaattctttgctggggtaggagtgggtttgttctgtatatagcacattcaaaagctcgccttgcttctgcctgctgatgccagctccaaatcacaccctccttctctacaccttggtaaccaaagacagcttccaaagacaacttctaggcattgtcaaatgcatcatggacagcagaaacattgtttcctcctccatcctcctcctcaccgaggaaccagtggcgcccagtaaacatgtacagagtgaccactaatgcaaaaggctctatgtgagaggctctgcgaattagtaatatagaagacaaagacagaaagcattcacatagaaaaagagatgcaaaaatgctactagaatgtcaaggacacaaaatgagcatatttaccatgacatggaaactttttaaatctctggaagtgaaaaagcagcaaaaattggtgctgaggcaagataaggtagtgacatttttgacaggaagaatatgataaaacctttgttaattgagaaaaatgatattggaggaaattagaacaacatagacatgtcaaataattatcaccatacattttgtttattaatagtctaaaaatctgggcacggtatctcttgactacaatcctagtactcgggaggctgaggtaagagaaacttacaagtttaaggccagccagccagataccaactgctcgccagcttgagctagaaagtgagactgtttcaaactaccaaaaccaaacaaacaacaaaaaaagtcggaaaaacaaacaaccactaagcccctttaagttagcacaaaatgacaggcttcactaagacatttagtgtaagtgtctacttggactttgttcacagttgccccacaaatctctcttgtctaccctgttctcctgctggtcctctcctcttgcttctccctccatatagtccccctctgtgtccacatgcgtgtgtgtgtgtgtgtgtgtgtgtgtgtgcgtgcatgtctatcctacccatgagagagaatactgcacatgttttggtagcaaaatcttttctatctgcttccatgttaacaatgaacatcaaatagcatatttataataataagatatattaatcatatagtaaatataggaacttatacaaatcaaatattttgtacctcagttggtggcaatctgattgtatacacttctatactcagacaaacttgtgtttctgttacgttgatgtctaatactgaaaaagaattaaccttaagttttctggagttagtattccatcctacactttatatatcagtgtatacattaggaacagttttttatacatagagtaaaattcagataatgaaccataggtttataaattacacttctatgacaaagatttgaaacaatttgatatgtgtgggagggaggtcctataacaggataacagtaagaaaaataatacctcctacagtttaaaggacactcactaactggttactgcaaatgtgacatctattactaaattccagtgaggtctcacaccaagcttcagaaacaaagctgtgctggcatgtcagaggaatggcatctgaagagagctttgagagcctcagggatagtgaccacattacttctcgagctgtggaacagtgaggaggctgcatttactctgtgaaactttagtgagtacacactcaaaatttctgagtttgatctaagtatattacatttaaacaaatgaaaacaatctaacagaagcccaagaaatttgctcttctaaattattgtcttgctaacaagatctcatgctagtgtaatgaagctaaatttaggtagcaaactgattcacctggagtgagatcagagtgactgctactgtctaactgaaacacatgaccagtgccagacaggagactcagttcagcaggacaggctactctgctgcactagttgtggattacagatgaggatttgaaaactatattcaatgatggggcacctgacacgtctgatttcatgcctgctgagggcttatgatcccgctcctctgctacctcagcactactctacagggaccaacctctcctcagtgcaactatgcaacaatcagttagattggatgttacaatacagtctatctttaagattagtcacgttcctttagaaagtatttccagggtaaaaataaaattctaataaaaataagcttcaatgtaagaaatacaattttgataatataatttaggaaaatatattcaaatacttgcagaattaaagatcttcagcatcattttcttaagtagagaaattaaaatacagcatttcttccaattaagtgaagtttttcctctagtatgtaaatataaatatatatatatttgaatgagaagtaacttcctgggtgaaattctgattgtaagtatgtgttagtattttctgacacacagtagttgtcaagactgtaacaacctaacatgggtttttaaacaactgttaatcatattaatgttttgtctattgtttttacattattgttatacatttttacttaaataactgttaaccatattagtgttttgtctattgttttatacatttttacttaccaactgcactttgttttcccgcattagaaagaaaatctgttccttaaaaaattcataggatataccacattattataatactgaaataatcattattgataaatataaccatttaaagaaaaagtatcaaagctatgaagattataaaacaaatatgtaatgacagtgcatagaaaataaaatcattcaaaaagtatctctccactgaaaaggaccaagataaccaataattcatccaaaaatttatgtctttctataaaatatttagaaaaccatcagacttcagtaaaaattcaggatagctctttaggtccaacaatactgacattctgtgtgtattttatcaaatccttcataacttatttattcttaagtatcaagtattaaataataaaagcattttaaagcaacagcaataggactctgtatattatccccatgaaaataagattattgtgggcttgtgtgacaatgtttagagttggagctaaaactcttctctaaaagtaagaatccttgaaataaaagccagaggtacactaaaagtaacctagctcaaaaagtatcaatggccgggcgtggtggcacacgcctttaatcccagcactcgggaggcagaggcaggcggatttctgagttcaaggccagcctgctctacaaagtgagttccaggacagccaggactatatagagaaaccctgtcttaaaaaaccaaaaaccaaaacaaaacaaacaaaaaaaaaaagtctcaatgattggcaaacacaaagtcaccttgtaccaagagatgacctgtcctattccaggcgggagcgagtctagccatgagtgagtacgaaaggcagttttgaagaattgcaggagttactctttgtggagcctccatctaaaacatcaaagaaaagttgcgcaaattgagaaaactgctatgtatctgtaaactcaggtaatgtctacaggttcagattaacatccaataaactaagcaattctagattaaaattatagttgttcctactgctagtactgtttagttatgtggctaaagaatttaaagagatactcactttgaagctaccactgtggcaaaactatctgcccaatttcctgcttatgcttaggcctaaactcaagagctgtgctgagcatccatgtatcctgctccacacagaggaactcaagccagaatgatattgtggtttattttccctattatttaacattagaaatggctcagtacaaaagcacatgtgtaatcaaatacatatctatttattcaaaattaatctttaatattaaggctttcgttgctaactcccaagcaatacgaatcagatttatcctcccacttgaagtctcaaaaaaaaaaaaaaaaaaaaaaaaaaacctaggcaagtttttgaaacaatggttcatcaaatactggacattatggaacaaagaactattctccatgtggggagggaccaacaaaatgagtcctatcttgtgggcttttcctctatagagggtaacattccccatcactctcactggcttattgtacaaagtgtgtttccaggctgtagtcatggaagaagcagtcgagtgagtctgttagtctctgagaattgaagagatagagctgagggttcacagggagccaaagtagttaggaagtgctggagaggccagctatgcagagaagagacagaaggctctgctggtcagcacagtgctccctgagtttcctgctgagtaaggattaacacacatgtgagggaattgctgaaggttagaatggaatccaaagctgtggagcctccatctaaaacacatataagtgtggagtaaaaatctagaaaacttctattggaatctgtaataaagacaagcaggaaagcgagagcgccaagaactgtcctccagtattaatccctgggaaatccacagttacacagatttcaatatcccgatcctagtaagttacacaaacagagaacaacaggaatttagtagatttatcattatcaagcaacgagacccatttcacatttagagattacttaatacaataaaaccagaatacatattcttgtcaagatgacaaaggatgtttactaaatccatgataaattatactcttatctcagaatttttttaaaaattgaagctttatgaaatatcttcctaaacaataacaggatgagaaatcatcagcagaaagatctctgggaaagccccatttggagactccacaacgtgtttgtaacacgctaggaagtcaaagggacgactattccgagaacaggcacaactctaactatgtctatgtcagaaaagaatgacttctcaactcggtggtatcagtgatcactttaagcagaagaaaggaaatactataaactgaaagcaaaagaaatgtcaatgaaatacaaagtggtaaaacaatagagaaaaatctatgaaaccaagtcccctccttaatccccgttgaggcttggcctttgttagctactgtaatgtgaagtgtgggtcccaagacctggagtctgcacttagaccctgtgaccctgccctaagttatttctgattggtaaataaagatgccaacagccaatagctggacagaagagacataggtggggtttaggtttcccaggcttggggctgagaggaatgacaaaggagaagaaggtgaatggaggaaagaagctaccatgggttaggaggaggaggaagcagctgcccagttaagagaagttattggagttaaaagaagctgagataatacatagtaaatagtaagtaataacttggggttatcgataggaaagtagattttatgcatggagagtaggcagctgcccagtccttgttttatttattcacagcctttattaaaggctgtgagtatgtctttcatccaagaactaaaaagtctacggtggggtagaaaacccgggccagattaaagtcatttctcatcaatgactattaactctcaaggtagactgatcagaacctaagaaaaagaaaagaaaaaagatcaaaagatcacacatataaccaatgctaagagtcataaagaatacatcatgtcagattctataacaaaagaaactaggagactaccaaagcaattttgaaagtttagatgaaaactaaattcttgaaataaataatatccctatttcctgttaaaataaaatttcagttaaactttcagaatctaaatttcagatagccctatggatgagtttcataaaacactgagggaagaaataataaaattagacatgacttcttctaaaaaatttttctcgtttattttgttcacttttttaaaaaattctttttttttttttttttttttttttttgagagaagatttctctgggccttggctgtcctggaactcactctgtagatcaggctagcctctgctactcaagtgctgggattaaaagcatggaacaccaggcctggccagaaataggattatttttaaagaggggggatatttgtttttcactagatgatccctgatggcaggtatcttaactgatccacagctgtgatggataatgttaactgtcagattaactgacttgacaggtactgaaaggaagcaggcttctgggtgtgtctgcaaggatttcagagagaacaactgaggggtgggacctactgaggggcagtgcagtgccatccgcacaggctgcagatgaggccaggctgaaacacaggaggaaagagtagaaatgggacctcatgaaactgcaaagcttctgtaaggcaaaagacactatcaataagattaaaaggccaccaacagattgggaaaggatttttacctatcctaaattagataggggactaatatccaatatatataaagaactcaagaaggtggactccagaaaatcaaataaccccattaaaaatggggctcagagctaaacaaagaattttcaactgaggaataccgaatggctgagaaacacctgaaaaatgttcagcatccttaatcatcagggaaatgtaaatcaaaacaaccctgagattccatctcacaccagtcagaatggctaagatcaaaaattcaggtgacagcagatgctggcgaggatgtggagaaagaggaacactcctccattgttggtgggattgcaagcttgtacaaccactctggaatcagtctggcactttctcagaaaacatggtactaccggaggatcccgtattacatctcctgggcatatatccagaagatgttccaactagtaagaaacatgctccactatgttcatagcagccttatttataatagccagaagctggaaagaacccagatgcccctcaacagaggaatggatataaaaaatgtggtacatttacacaatggagtactactcagctattaaaaagaatgaatttatgaaattcctaggcaaatggatggacctggagggcattatcctgagtgaggtaacccaatcacaaaagaattcaaataatatgtactcactgataagtggatattagcccagaaacttagaatacccaagatataagttacaacttgcaaaacacatgaatctcaagaagaacaaagaccaaagtgtggacactttgccccttcttagaattgggaacaaaacatccatggaaggagttacagagacaaagtttggagctgagacaaaaggatggaccatctagagactgccatatccagggatccatcccataatcagcctccaaacgctgacaccattgcatacactagcaagattgtgctgataggacccagatctagctgtctctagtgagactatgccagggcctagcaaacacataagtagatgctcacagtcagctattggatggatcacagggcccccaatggaggagctagagaaaatacccaaggagctaaagggatctgcaaccctataggtggaacaacattatgaactaaccagtaccccagagctcttgactctagctgcatatgtatcaaaagatggtctagtcggccatcactggaaagagaggcccattggacatgcaaactttatatgccccagtacaggggaacgccagggccaaaaagtgtgagtgggtaggtaggggagtggggggagggtatgggggacttttgggatagcattggaaatgtaaatgaggaaaatacctaattaaaaaaaatttaaaaaacaaaaacaggagagcgcaggccttccctctctcctcccacctgggggggaacataagaagagcagctcttctcagcttcttcaccttcccaccaatgtgctcagccctctgaagctgtgatgtatggccccaacccccacaccaactttctatctttaaagaagctcaccattagtagaacataatttataattttatttctctctatatcagttatgtcattgtggcaatgatgccatctttcagaatttcaccttttttcctgtctaaaacttcagaaaatccattaatttctctctgtgtctccttaaatgtgcacaaaataattgtttagaaaaatcttggtcttttcccatgcataacaagaacttgtgaaaaagatggtacaaattttgtttgttgactgagctggttagactttcactatttatttatttatttagttagttagttagttatggctacttaacatatactagggtcatctggaaagagggcacctcaactgagaaaatgtcttcatcagatcggttgctaggcaagtctgtggatcatttattattattatttttattattattatcaatgattggagtggaaaggccagcccactgggtgctgctacccctgggcaggtggtcctgcgttatgtaagaaagcaagctgagtgagccacgctgcaggcctgaagcagagctcctttgtggtctgtgcttcaatccctgccttgattgcctgccttgattgcctgccttgattgcctgccttgattgcctgccttgcttcctgccttgattgcctgccttgattgcctgccttgattgcctgccttgattgccttgcttcctgccttgattgcctgccttgattgcctgccttgattgcctgccttgcttcctgccttgattgcctgccttgattgcctgccttgattgcctgccttgattgcctgccttgcttcctgccttgattgcctgccttgattgccggccttgattgcctgccttgcttcctgccttgattgcctgccttgattgcctgccttgattgcctgccttgcttcctgccttgattgcctgccttgattgcctgccttgattgcctgccttgattgcctgccttgcttcctgccttgattgcctgccttgattgcctgccttgattgcctgccttgattgcctgccttgcttcctgccttgattgcctgccttgattgcctgccttgattgcctgccttgcttcctgccttgcttgcctgccttgattgcctgccttgcttcctgccttgattgcctgccttgattgcctgccttgattgcctgccttgcttcctgccttgattgcctgccttgattgcctgccttgattgcctgccttgcttcctgccttgattgcctgccttgattgcctgccttgattgcctgccttgattgcctgccttgcttcctgccttgattgcctgccttgattgcctgccttgattgcctgccttgcttcctgccttgattgcctgccttgattgcctgccttgattgcctgccttgcttcctgccttgactgcctgccttgattgcctgccttgattgcctgccttgcttgcctgccttgcttgcctgccttgattgcctgccttgcttcctgccttgattgcctgccttgattgcctgccttgattgcctgccttgcttcctgccttgattgcctgccttgattgcctgccttgattgcctgccttgcttcctgccttgattgcctgccttgattgcctgccttgattgcctgccttgcttcctgccttgattgcctgccttgattgcctgccttgattgcctgccttgcttcctgccttgactgcctgccttgattgcctgccttgattgnnnnnnnnnnnnnnnnnnnnnnnnnnnnnnnnnnnnnnnnnnnnnnnnnnnnnnnnnnnnnnnnnnnnnnnnnnnnnnnnnnnnnnnnnnnnnnnnnnnnnnnnnnnnnnnnnnnnnnnnnnnnnnnnnnnnnnnnnnnnnnnnnnnnnnnnnnnnnnnnnnnnnnnnnnnnnnnnnnnnnnnnnnnnnnnnnnnnnnnnnnnnnnnnnnnnnnnnnnnnnnnnnnnnnnnnnnnnnnnnnnnnnnnnnnnnnnnnnnnnnnnnnnnnnnnnnnnnnnnnnnnnnnnnnnnnnnnnnnnnnnnnnnnnnnnnnnnnnnnnnnnnnnnnnnnnnnnnnnnnnnnnnnnnnnnnnnnnnnnnnnnnnnnnnnnnnnnnnnnnnnnnnnnnnnnnnnnnnnnnnnnnnnnnnnnnnnnnnnnnnnnnnnnnnnnnnnnnnnnnnnnnnnnnnnnnnnnnnnnnnnnnnnnnnnnnnnnnnnnnnnnnnnnnnnnnnnnnnnnnnnnnnnnnnnnnnnnnnnnnnnnnnnnnnnnnnnnnnnnnnnnnnnnnnnnnnnnnnnnnnnnnnnnnnnnnnnnnnnnnnnnnnnnnnnnnnnnnnnnnnnnnnnnnnnnnnnnnnnnnnnnnnnnnnnnnnnnnnnnnnnnnnnnnnnnnnnnnnnnnnnnnnnnnnnnnnnnnnnnnnnnnnnnnnnnnnnnnnnnnnnnnnnnnnnnnnnnnnnnnnnnnnnnnnnnnnnnnnnnnnnnnnnnnnnnnnnnnnnnnnnnnnnnnnnnnnnnnnnnnnnnnnnnnnnnnnnnnnnnnnnnnnnnnnnnnnnnnnnnnnnnnnnnnnnnnnnnnnnnnnnnnnnnnnnnnnnnnnnnnnnnnnnnnnnnnnnnnnnnnnnnnnnnnnnnnnnnnnnnnnnnnnnnnnnnnnnnnnnnnnnnnnnnnnnnnnnnnnnnnnnnnnnnnnnnnnnnnnnnnnnnnnnnnnnnnnnnnnnnnnnnnnnnnnnnnnnnnnnnnnnnnnnnnnnnnnnnnnnnnnnnnnnnnnnnnnnnnnnnnnnnnnnnnnnnnnnnnnnnnnnnnnnnnnnnnnnnnnnnnnnnnnnnnnnnnnnnnnnnnnnnnnnnnnnnnnnnnnnnnnnnnnnnnnnnnnnnnnnnnnnnnnnnnnnnnnnnnnnnnnnnnnnnnnnnnnnnnnnnnnnnnnnnnnnnnnnnnnnnnnnnnnnnnnnnnnnnnnnnnnnnnnnnnnnnnnnnnnnnnnnnnnnnnnnnnnnnnnnnnnnnnnnnnnnnnnnnnnnnnnnnnnnnnnnnnnnnnnnnnnnnnnnnnnnnnnnnnnnnnnnnnnnnnnnnnnnnnnnnnnnnnnnnnnnnnnnnnnnnnnnnnnnnnnnnnnnnnnnnnnnnnnnnnnnnnnnnnnnnnnnnnnnnnnnnnnnnnnnnnnnnnnnnnnnnnnnnnnnnnnnnnnnnnnnnnnnnnnnnnnnnnnnnnnnnnnnnnnnnnnnnnnnnnnnnnnnnnnnnnnnnnnnnnnnnnnnnnnnnnnnnnnnnnnnnnnnnnnnnnnnnnnnnnnnnnnnnnnnnnnnnnnnnnnnnnnnnnnnnnnnnnnnnnnnnnnnnnnnnnntaacacattctgtctagtacatggagcctaaatggaagtttaaatttaaatgtttaaagagaattatttaccttagtagatacggttttgctaacagacagggtctcagcctgtcttctatgcatgtttgcacctatagattaggacagctctcagtcctcgccacagacccttcttcatgtggtagatggtgactaccagagacgcacagcaggtcagtgtgcagagagtaagtgactataaactgctcatccctaaatgggataactatatcatactccctacatgaaggctcatgggacatcacagggggtggacagacagatggtaagagacagagatcagggaggactgctgtggaatagcttctgggtattatagggtgactagactcacaaagtcacagcagttgtgtaggcctgcacaaaatcaagacaaccagcatgccagcatggatataggggacacatgaggtcccacatctagctgagaagctactgagtgatggtttctagggaagggagaatctgtttcctttaggggtgtggtacctgttaggtgaccatgtagtagacaagccaaccccacaaatgtatgggcagcactaattagagtcagtggattggtttttttaaaaaaggggatatgaagttgggaggaggaagtgtttatatctggaaggatttgaaggggaaaactggagggtggagggagaatgtgacagaaaaaattatatgcatatatgatattctccgagaataacaaaaagttgatttactgagatgagatacttaattataattaaaatattgataaaacgcattatagcaaattctgtcttagatattgtgtataacacattctgtttattagtagtctctacctcagcacttatgccagataaagttaaatattaatttagaatcataaaatagatctaaacatcagacacatccattagtggggtattcactcaaactaaaatatggggtagttaatccttgtaaaccatctttaatttctgatgtcatacttgaattactgcttaccaatactgtttcaaataatcagtaatactaaccgacattactactgaaatttggtttaatattccagacacaggtgctgtgagaatatcttcatgcaaaagtagcaactgcctgtggagaagaaatactttattttctaactgaacttgtctacttctatagttgtatgttactggaatacttagaaatagtctaaaaatctcacttcctacctagttggttaatttcaaaggtctcagaggtaatttgcagtaagcataactaaattacacccaaatagggaggctgccgacttcctgatgcacttggggggaggtaccacacagggtgcactcccagactgctttcctcattctgccctgagcagtctgttctgttcaggcatctgactgtcgagtttagaacgcctttaacttgagatcctcaattcttagcctctagactgataggattataggtatgctctgttacacccagctcactcctagaaaatttaaaggttttattctttaaatttatatttaaagatgtttatctaaatatataatcttttattgagtacctcaattaaaggaactaataaatgtgaatccttaataacaggcttcagctgagctgctccttaaagattatcttgggtcaggcattacaagataattcttagagaaatactacccattgtcctgttttggtatgaaaattatattagtcttttagtatttttaagtgtcttataaagagcagatagtaaagtttcattactgagtatctctacgttttggggagcctgacttaatttatgaatttaagtcttatagagaattaaaatttatttttgttttatgtgcattagtgttttgcctgcatgtatgtctctgtgagagtgttggatcccatagaagtggagtcacagacagtcgtgagcttacatgtgggtactgggaattgaactcaggtcctctgatggagctgctagtgctccaaatgctgagccaaatctctagccccaagaattaaaaaaaaaaaaaaaaattaaagcacagaagatgtcagaattagaaaagctcaacagagagatatccacttcaggtattttaagtccttctttaaatccaacttatccgggtcctttgctttcaaagtgtatatacagatttaataaatgttttgaggaaacacctactataatagcaaccatgtttttttttaaactttaaaagcttagatagaaagcctatgttttcacctgcacatctttagctgagcactcctaatgtctatttctgccaccctgctactcagtattatctggacagagcagagtttgtgtaaatctggaagaatgatgaagaacagggactgcagtctggactcattcatattttcttcttgactgtgtttcaggaaccaggccttcaaaaacaaatgacagtaaagaatgcatagacaggtttagccgccaggcttcaacaccaactcagcagataatatttgatgtcatgttagaataagaaaattaaaaagtaaattagtaaactttagccgcaaaaacatcaccgtttcacctccacggtttctcaccatctctaatcacttgtgtttagcatagttttattgagataatattcacctgcaattatccagttactataaagttcaatgctttttctttactatattcatggagttatacactatgcaataaattagaacactttcatcactcttccaagattctaaatcttcagttctacaacacaagttgaatggttaatttaaatacaaataataataattttaaaatccctaatttgttaaatgccttagtcttttttaggtacttgccatattgtgtttaataattttatttgactgatgctggctatccttgaagttttgatttcagaaaaacataatcttttctctcacataatttaacataaaacatgtaaccaagacctctgctgttttagattctctctataaactacttcaaggttaaagaatatattactcttttatttgacatgaaggaaaatgttagctggaatctctaactgtttagtaggtttcatttccaacagtttacttggctttaaacctctacatggggcacctttcaaagctgctaattcacattctgccttcggcgtgtgtatcatgcatctcacaaaactgggaagtaaatgcagagctggctagggaagagcaactaccctgaggtgcacatatacaccagagggaggtaacctggatgactgaatgctaagcttaacacaaacgtatcccctctctttaaaaggaaacgactagccctggaatctgatgtgtggtggactttagtctgatctctttaaccaaaagcctttgttttcattggagggatgctaaccatggcctttggcttgaacacatttggctcacttaaaccccagaaggaagcatgtgaaattttcctcagtagtattttagtgctggattcacttatacttctcatgggccactttctcagtgacagcaatatctccaacgtcttttaaaaaacaaattttaaaaggtgattctagaagtgtctaatgctttttaaaaatcaaaacatatgagttttaacagagtaataatctcctggccctaaagctagcgctaatcaaaaagagctctctgttcaatacgagggagggtgtgtgtgtgtgtgtgtgtgtgtgtggtcctcaggatgctgcaccccgactttccctgggccttcaggagaaggagggtcttatgattctgatgtctccctttcctaagcaccatgcttcctaatgcctggtgcctctcacataatttaaatataaaaatgtataaccaagagctctgctaatttagattctctctataaacctctcctaggttaaagaatatatatatatatatatatatatatatacatacatatacttaacatataaaaatatattaaataaatattaaataaattaaattaaataatattaaataaatattaatatataaaataaaaagatatataaatttagtccttatatataaatatatttttttacggcctctcttcgggaggagagggaggccaggccggcatcaaagcctgctcattctggccgctgccgccagcggccctctctgtacctcagtctctctacttctgtcctcgcctcaggactgtcctgctgcccgcgcactcggggatgctctgtgcgtgaagcaagcctcgtgctccagtcagaacccgctctcctcagacagctcccgccaagtcccacacgctggaaatcccgtcgggccttgcgctcagctctggcctctcccatcaggccctgcgctctccgctcctgggaaggcctctgctccctccccgctctctggtcacatctgcgttcctgaccttcctgctctcctgtcaaacttccagctcctgtcaggacagtggcactccaggcggttccctgctcctcgcagggtctgcattggggtcaggctaggacttcactcagcccaggcagcacccacccagttacttcccggcctagcagagggctcttgtcagaaccgagcggttagcaaccctgctcccgttgggccttgtgctcccaccaggtctagagctcccggagcacctgtgcttctccatccatgccttattatggcccttggcagctgctccagcgcatttcttgttctcagcatgccttgttttcttacttggtactttggtgcctttttagcatagggagccattttcagcacgacctgctgtgtcaacatgtcccaagccctactatctaatacatgcagagcttaccactcagttctacccctgtgctttcccccaccaaatccagagtgcaattagcactttgcaggtgaccgagatgcctaagagtggtaaaaggacggccacgaagcagcagccaacacagttatctgaggtgagtagagggcataatgttcggttacagacagacaactttctgctcagattctcttttctctgttcaacttccagagctccttttgtggggataaagctccgccactgtaaggtctttaaaagcttgaaatgccctcctgtgactcatttgacagatagttattaagcgcacaccatacacggttgctcgtgtttgatgattaagcaaacagtattttctgtcccagaagaatttactcggagtaggaagacatagtattactggagcgagctcattcttgttagacccacagaaaatgagagttgggaaataatgagagaattgtctgctcttttttgattaagttcttttgcaagactccaaagagctttctccttgcagacattcgaattactgacacacagtttacctgcaacattcttcaagactgcaacaactcagataagatgtgcttatcagaattcatgcccagaaaaaaaaaaaaattcctccaccagtgagctcaccctaactgctgattagggcctctaacactaatggattttgtatataagcaactcacacgaagatctgcttcttaaatatgctaatagttcatcatggtactacaattctgaatggaaaaaaaaatttcagataggacacactttagtgtgaccttgtttaaaaataagtgatagttttctaatcaaagccaaacaattcattggtgatggatttgatgttgaggaccgttgagatgatcccctagtttttggcctgagtgacatcattgtctctagtcctgtgactgtcaaggatcctaaacattctgcataattacatatggtatgtggaattctatttatattattttaatattgttcttgcttgttgcaggggtttctgtgactaccctggccagcagagtgacaagccagaataggtaagaaggcagtttggttcatcacaactcagtagccagtgttaattcaaacttctgaagtttgaccccgagtaatttatttattttaggactatttaagcacagcacaatttggtgaaaacttattctgatgatactcagctcaattccaccatcataacagagtatacataaatcttcattctttggaaagtacataaatataggtcctacagattgactgagaaaaacaagcttatgataaaggtgtaggggagtacccaataccagaaacatctctagccacatagatggaacaacggttagcaggcagggctagtaaacacatttgctccccgctttctgtgtgggtaatgggtatagcattccttccttgaagaaacaactccatgaacttaacatgtggacagacacaaagacctccgtgcttcctacatttaccatttaaaccaatacctacaattattaattacttacactgccctgctcctgtccccagagggacacacaggcaaatgtgcccaagagtgttctcaggatttgaaagtgaaatgatcacctttgactcacgtgtggactggacctcagctatcatgtaaactttagtattgtaagcccatctggaggaaatggaacatgtagagacatattttagaagttagacctggtccccagtcctttcctctatgtttgctgcctctcatgagctaagtatcctctgctatgtgctcccatcccttgttgtttggtccaagttgatgagaccaggtgatcatgcactgacctctctgtaaccgtgagctaaaatcagtaattcctcttctttcctcttcttcaaacatttggttatttgtttataactatgcaaaattaagtaatataaattaatttatggcacagtatcctatatgtaattacttatcattgtctgacgttactgtgataagtggctctagatcacaaatgaacgctagatgcttttaaaaaatgttgtctgctttttagattataattttattacagtgtttctcccttccctttctctgaatccttccatatatccatctccactctccttcatatttatggtttctcttttcattaattgttattaggaacacacacacacacaccctgttcagtccacatacttgtatgcatgttttcagggatgaccttttggaattggataatcaatcagcatgctcttccctatgacgaaccatgtgtctagatacttttactagctctatggtcagatatgatagtttattgtactttaattcctcattctgatgctgaaagaaactcagtagctttgttggtgtttatgaacagtcatgggataaaacaacttcaacccatagaaagatgttttactttcaaatgaatacatattttagaaaagttgggaattacttctgttaggtggacaattacttagatgtaactaaatatgcacaagagacagatatttctggaaaggaaaagatatcctacattaacatgatattcaaaagttttgtgggtgggttggtgtccttttcactccattggggttcctgcctggctgtaagagtggcctcatcaggttccatatctccaatgctgtgtgcctcacggctaaggtcacccctattgattcttgggcacccccgttatcaaggtctctgtttcttcctggagatgctccctacctttccactccaatcagtttcaggtttccattcattctcgagggcatttggccatgtctcctgtccctccccacacctgatccctaacctccaccctccattcccctctccatcccctctctcatccagttccctcccttcatctgcctcttatgactattttattcctccttctaagagagagtcaagcttctttgcttgtgccttccttcttgtttaggttctttgagtctatgtaatgtagcatgcgcaccctgtattctatgtctaatatccacttataagtgagtacataccgtgcatgtccatcttgggactgggttacctcactcaggatgatattttcaagatccattcttcagtttgaggacacctaggttgtttccagtttctgactattacaaataaagctgctatgaaccaagctgagctatgaacaaggctgagaagtatctttgtgaacgggggagcatctttttggtgtatgcccaagagtggtatagctggatcttgaggtaaaactattcccagttttctgagaaactgccaaattgattcaagaggttgtacaagtttgcactcccaccagcaatggaggagtgttctccttgctccacatccttgccagcatggtctatcacttgagtttttgatcttagccattctgactggtatacaatggaatctctcaagtccaaggggatcaatgagctcaacataaaaccagatacgctaaatctcatagaagagaaagtaagaaatacccttgaacacattggtacaggagacagtttcctgaacagaacaccagtgactcaagctctaagatcatcaattgacaaatgggaccttaggaaactgcaaagcttctgtaagacaaaggacattcttaataggtcaaaacagcagcctacagattgggaaagaatcttcaccaaccccacatctgacagagggctaatattcaaaattcataaagaactcaagaagttaagcaccaacaacccaaataacccccaaaatgaggcacagagttagagagaattctcaaaagaggagtctcaaatgtctgagaagcacttaaagaaatgttcaatgtctttagttcaaaacatgatattaaaaaggcatacttatatgcagattttctgtgttcacatctaaattggagatccattttagtagaaaagtttatttgataaggaaagcagggaaagaagtggtggggcaaatatttcttagagtatattttttatttgcagaaagttaagagcggggttgattttcttttttttttctttttttaagatttatttatttatttatatggaagtatactgtagctgtcttcagacactctagaagagggtgtcagatcttgttacagatggttgtgagccaccatgtggttgctgggatttgaactctggaccttcagaagagcagtcgggtgctcttacccactgagccatctcaccagcccagggttgattttctaaatgttaattacaatattcttgctgtagtagtcagatggcatttgtaaatatttgggaacttttaattccttaggtttctgtgtgtaaatttgcctgtttacagtaccttgccacatagaccacttcctcatacctgtgttttggagtaaggaaggcttattgagtaagaataacaattgcactgggtaatgtttactgatgccaatgtgctatactcactgtgaaacatgaacgaatggcttgcaacagttgctgactaggccatcataatacctttatcatacatctgataaaagtaaagataggattcaggtcaccaaccccaaaatggttttgtttttgtgtgtatatgtgtactggttttgatttgtgtgtatacacacactggtgggtgtgaaggtatgtgcacatgcgtgtcaagacctgaggttggtgttacatgtcttactgaattgttctctaccttccttattgagccaagctctcccattgaacctgaacttgccatgttggctagtctagctagctagcacgcccaaggcattttgtgtctcagcctccctagagctcaggtggcagaaggatgccatacccacccagcttttaagcagctttcaggcattcatacccctgtccgatcctttgcccagcaagcatatcacccactgatacctctccccaggttcaaagttttgttttgaaatacataaggaattacttgaaaccaaagcttgaagcactgaattatagaggctgtcataacctcaagagaaggcagtgcatgaggtcatagggagattctgtcctatgatggtcctatggcttcaagggaacattatatgcctatttatgaaaaaatggtgtggggagtgggtgtggcggtagtcccaagatggcgcccgggactgcagccaagtcttataacttgcacctgacttcctcatacacctgaaaataagccacttccatcgtgagagctgcgcaggcgcaccacgacgcaagagcaggccatttgacgaaggccaatgaactgagattacgcggactgggctgatggggcgtagttgaggggttatataagggattgcgattgggggctggagagagattcctgcttgcatgttgaaaggttcctgaataaactgctttgagaagaatgctgtgtcatcgctcttttctgctggttggagacagagcgacaaaaagaaaaagtcagagatcaataatcaaagggtgggtaaaataagaaaattataataaaatgtcttttaagcaaaaatcaatgaaattaaaaaagagagaggaggggaaaagaaatccaggcaaactagaagctgatcttttgtccttttgacaaaatgagcaaaactggcaaacttctagcaaaactggcaaagaagaaaaaaaaaacatactacctattactaatgttgggaattcaacagaggatgtagctacagatcctacattattaagaaggattattaagagactaacatgatcgggttcacacacatagattgagcacacaattgaaaagttccaaatggggcttggatgatggctgtggtggattgaatatatttggcccagggagtagcactatttggaggtgtggccttgttggaggaaatatgtcactgtgggtgtgggctttaagacccttaacctagcttcctggaagccagtcttctcctagtggccttcagataaagatgtagaactctcagcccctcctgcacaattatctgcctggaatgaacctctgaatgtgtaagctagcgccaagtaaatgttgtccttataagagttgccttggtcatggtctctgttcatagcagtaaaaacctaactcagacaatggccaagtgggcaaagcacttgcagcacaaccctgaggaccccagaattcagagccccagaacccatgtaaagccacatcatttgtaaatgatgtatgcctataatccctgtgctactataaggaggtgtgccatggagacagccagcctggagttctcaggcccaagaaaggtagcctggataacaaagaggtaaatgttggggccctgcctgaaataaagtgaagtggggatgggaacccaacattgtcttctagttgcacatggtatgtctgaattcacacacacatgactattgacacatcatacttatatataacacacacatacacacacacatacaaatgatcataactcacccagtataaaacagatatattaagcagtcctttaactagtcaaaaaaaaaaaaaagtctgctgacccatagtagacccatataattacttaactagggattccaagaaatcattacacaaaagtagtcaccaaatcccttaaaagaaggcaacaggtccttgttatataaagctagatccctttattattcaatccttcaaactacagcagctaatatggaactgagagagcatcttctatcataaacacagacacacaattgtaaaagacataaatagaactcagcagtatacacaaaaattgcataccacacacaaatgatgtttattctagaaacacaatgctagtttgatatttaaaacacaatgcatctccttgtaggaaagggctaaagaagggaagtcatatgaccatttctactgatggaaagcaagattaaagctctctccgtccttgtgctagaacttctcagaaagctggtggtcatgaagaagcttttcaatttagcaaagaacacccatgcctctaatcccagcacttggaaggcagggcctggggggtggggtggggcaggaggagacaactctctctgcttctttgacaaagaaagagcttcgtgtattttatgtctgagtgtcctgcctgcatgtgtgtctggtgcctgtgggtagcagaagagggttttggattttctggaagtaatgttgtcgacagttgctgggaattaaaccctggtcctctgcaagaacagactctgctcttagttgctgaccgatctctccagccactcttcctggttcttgactgcagatacaatatggatgtcggcttcccagacatgccttccccacaaggttggaccctcaaactgtgagccagagaaactgtccttctttaaagtagtttttcccagttattttactgcagcagcaagcaagcatattattatagtcacctttcaagatggttctactcaatgagataaaggattgaaaaaaaaaaaggaagaaagagagtgaaaggcataagtcattgtcagatgatatagtggcctaccaggaaatctcaatgcacatgcaaagaagcagagttcctcaaagtgcagactcgaggaaagtatcataactagttatgtaattatatattgaaaatgaatatagggtgtatataagaaaatacagcaccatttataattgataaaaaatgaacacctaggactggcaaggtggctcagtggtaaaaggcacttgtccagcaagcctggtgacacgaagtcaatccttagaacctacaccaaggtgggaatagggaagtaaaattgtcctctgaccttcacacacatgtcgttggcatgtgtaccccctccacatcacagtaataataaggaatacctaaaagcttatgcaacaactgtaatttagatctatacccagtggagcatatagaacttgtgtgatgaaattaaaagagccagtgaaaaatatctaagaacctgtgcaccagcactctgtgctcatagattagaagggaccacagtaaacaattccaacttcacatatagtgttaatgaaaaacattctttaaaaaaatgtgtatgcatgtgcacgttgtttgtatgtgtgccatatacatgaaggtgacattggaggttagagagggctctggggcaactggaaccagactccaggcagttgtgaacagctttatgtgagttctggaaaatgaacccaggtcctctgcaagagcattacatatgttaaacgactcagccttctctcctctttctgaaggatattttcattaaaatttcagcaatccatttgtagacatcgccttccactgcccatctcatctatctccgaatgacttcccttgaattgactaccagagttcagaggtccatttgcctgtcatcgccacaaatgtttattgttctttatctaaatcatataaaagggccatgacttgcttgctttttttccccactttagtgtcttgtgaagatctccatgagcacataaaatgaacaccactcatgtgctttctcttgcaaatcggctcctgtgtttgtttgattgctaggtacagccaagcaacccacattttaattactgttgggcatgtgcagggcatttcttactcctttcatgccttctcaacaaataatgcttgagcaatttgatagaagaaaaaagaaccccagtgtaagtcatttattttattttattttatttaatattcttttttaaaaagatttttacttattattatatctaagtacactgtagctgtcttcaaatacaccagaagagggcatcagatctcattacggatggttgtgagccaccatgtggttgctgggaattgaactcaggtatgcctgtagtccaagctactcaagagtcagagacagaaagaactctttaaccaggagttagaagctaggggccgggcagtggtggtgcacgcctttaatcccagcacttgggaggcagaggcaggtggatttctgagttcgaggccagcctggtctacagagtgagttccaggacagccagagctacacagagaaaccctgtctcaaaaaagaaaaaaaaaaaaaaacaaccaaacaaaaagaaacaggctacacagtacatttccagccagactggaccacatagagaacgccaaaacagacacaaagaactaaataaaaattgaccatcttcaaaattaacactgtttgctttgacaaggactgagatgatgagaggaaaagccagaaatgggttaaaaaattttcccagttctgacaacgaactagtacatccataaaattcttttttattaaacataatactctcaaaactcaaaattacaaaagcaaagaaaaataaaatccagatggcaaataagcatgtggaaagctggttccgattaaggcttctgctttgaacacctattaaatggaagtcaggacaatacaaaataatgacaaggctggcgagcattttgagaagctgggtctctcaggcattgctgtagtcatgtggcatggaagatgacttagcagtttctaacaaactgattattcagatacttgtatttcccaacagccactgtccctggcatggaaaggtaaaatgttacattcacacaaaactcgtatacatttgctcataacaacttttccatagttaatcaaaagctggaaatctccaaaaacgttcctcaagcagtgggtttgaacataagctgctgtgacatgtcacaaccacacagtgaaagatgattggagctgctgtggtcaaagcctgggccctggcagcccaaacaagccaggctcagtcaatattccccaacagaccaacaacaaacagtactactgaatggcaaagaacattaggaagggcaaataaagagtgctagccacctcctcccccctgccgcagctcattttttttttttccgtctgacaggaggtaaaagttaagcatgactaagcagttctggctaagcctagtcactggcccatctcagctcctgtctcccttcaatgggctttgacaacttgtcacaactgtgtgaagtcctcttcctgggagacaagttccttttctggctgacaccagacttgagccctttccttctcccagcatgagagtctatggaaattccaatctggggggacaacgcctcagcaatctcttggctcccaccaggacggttatgccgctcctcagtgaagacagcgaaatcactattgatacagttcacatccgggatggatttcaaggacaatagaacaagtgagaaagctgacctcaattgtgttattgtatgattccatttatataatatggtgacaaaatagtacagggatgagacagattacttatcaccaggtgttaaggataatacaggagggagtgagtgtagttcaggaagacagtgccagctagagctcgtgacagagcagttatgctggggtatacggaggcaccccatacaccacatacaccagtcttaaaactcgagggaaccttgctgtattggtgtggatttcttttgttccctctcttcataacaaggtcttgctatataactaaggtagacatggagcttactaggtagacccaggctggcttctaacttgccatctgcctgtctttgtctctagggtgctgtttttgcaggtatgagctgccttgttttggtacttcgtagttacattaatatgtggtcattgggggaactgggtgagggatgcagagaaagatgacacatctgttccacatttgtaactttccatgaaactatgctttaaaattaaagggaagcagatctctggagttcaaggccagcctggtctacacagtgagttctagggcagcctggctacacagagaaactctgtctccatccaacccccacaaagccccattgaacttcttggatattgttcctacattatattttagttggttgatgtaaaataaaatattcatatgttgtatgtgaaccaaactgattagtatcttaatacaaagaatttaccttagaaatatttctgagtaacaattacaaccagaaatggttccttgtggttaaaaagaaaaaaaagaaaaaaaacagtaaaaatagtttggatgctttgagcaatgcttacttgccaatgagcagctaagggaaagggaacttaggcatttccaagcacctgcagagtttaggaccttcctgatttcctgggagaatcactgatgtgcccatcactaatgctatgtttttggagttaattgccgttgttgaaaagaccaaaaaacaaaacaaacaaacaaacaaactacgaagggcttttaaaataagtaaataagttgtcttctgttttcccccacccctgctttagatatctgtaatttatatatagtattgacttccagacaaaagggtaggggagtgccagcctggggagggactcagtgctgcgctgcgcccagtgttggtccttatttaggatttaaatttacactacagtggaggataagagaaagtctttgccatgtcagggccttgtggcacggaagttatttcaggttaaagaaattattagatgcttctaattttaatgtaacaatttcctttgtttgcctgttggatgagccactcccaatcccctgcagattccagtgaagcaaacggcatggcgcattatttggggccacacatttatttccagatcttaagccgtgacacttgcataagaggttctttcaaatggtccgttctgaagggaaaccacgcagagggtcactttggctcactgcaatttattccaagcgattatcaggatgtagggccgcttggtttaggaaatacgcaagagttaatgtgaagtagggtgtaagggaaggaaactaaggttgagatggagtttgacctggccctaaagcttcctctttacttgggcgctgagacctctgatcacacttccccagctccctcctacccacccacccacccccactggctgctacatgcgcagactcagaaaaccgcctccccacccaaagggctggcttggggtaaaagtgaaaggcacctcttgtagctaatcaacaccacgcgccgggctgtggtggggaatgattggactattggagggcgtcggctgagggcgggagcaccacactggccaatcccaagaggccttgtggtctgtgcccagtttgaggcaccgccctctcctggttctgggcacagggcccggtggagctgggaatgtcccgggcggaggcgctcagacctgatcatagcacaaccctgcacggctgtgttgcagggcccggtagactcactgttccgagatggccgggcagtcagacaaggatgtgaagtactacaccctggaagagattcagaagcacaaagacagcaagagcacctgggtgatcctgcatcataaggtgtacgatctgaccaagtttctcgaagaggtgagatgggcacgcacgctccaatgggacacaggaaagggtggtcccggctgtggatacccccggtgtgacctgggaccgatgtccgaaaatgcgttatcgggtgctcaagtgtttgagaacatttaagaagagggccttccgcgtctgcacacttgtgttcgcttctgagcatgctcacctgcttgtgcacacctgtatctgtgctcctgagtgccttgggttggcacatctgggcatgcccatgggaggtagggaagcatctttgcggtgtgggctgtttttgtaggcttcgatgggcggagtatttgcaggccaaagctggatccctgcgagatgctcaggagtgtcttgaataaatgctacccacttgctgggagagtgcataaccgcgtaaggattttgaaagaaccttttttttttcctttctttctttctttctttcttcctttcttttgctttcgtataaggctctttccatgtagagctcctccattttcgaatggacttttagtatcagcggtttggagacctctggtcttaaaagctatttcccccagagggttccttagggtcgcaggagtgtgtgtgtgtgtgtgggggggggcactcccagggctactttgatgcccagacccataaatttactagtgttcactaagcagagcctgaaggatgtcgaccttaatggattagtgacttgtctcagagccccagcaccaggtgagtgacccaaagactccctagtgtgtgccttgagctcatactaaggaagggaggtaggcagcatggtacagtcagaaaactggaactaaatctttaggctacttcggaagttgtaaaaatggcttaatttagaggaaaacatttcctctggcaatgctgatctcaagattgtagttcttgctgcccagcccaaggggcgttttgtttgtagtctttctctttattccttccagatgcactgttactttgggtcacacacactcacaaggactctgcaccccacttctttccagtaaataagagtgcttattgatgagggtggtttgcatgtttgtttgtttggtggtgggctgggcagaagtccagggtcagtgttagattataatttacctcaagggacatctgctttgcagagaatgttaaatacagaaaaaactgaaagtttggagttttagtttcatgctaaaatacttgactgttaacggtaaaatagggctccagtttagtaaggagtggcttgcagtgtgggctcagatctgcctctgttctgctgagcccagagcaggtttgcatcctagcttctcaaactaacagtcctgtattgttttgcattttgtttgtttgtttgttttgtttttgttttttcgagacagggtttctctgtatagccctggctgtcctggaactcactttgtagaccaggctggcctcagaaatccgcctgcctctgcctcccaagtgctgggattaaaggtgtgcgccaccatgcccggcttgttctgttctgtattgttaagccaagggccaggtgaatgacttcacgtggaattgttccccccccccccaccgccccaccaccatgatatatgtaattcttaaattttatgataaaattcgtcccttgactttgtgtatataataaagtgcagcacttgtaaaaagaaaaagacaaaacgttgagataatttatacgatgcagctgttttaacttgtctcgttgtcctttcagacaggtccctagacctcgggactgttgactttttaggttgcctccctgtcctgtattcagtggatgtcctaacagtgacaaccagcactgtctccagataccgccaaatgtcccacaggacatacagttgctcctgatagagaattgctgcccccaaaataattgtgtatgactttaaaaagtagatctttgaagtaggtaacagggatgagattattaaattatactcagtcattgattctcttaatttattctcatgaggcagggaaggagtggggagaggaccccacagacttattgagctcagctgaaaggctaacaagaagctgctctgtaggaaaaaaaagctggaaagaaagttcctttgctctggctaagtttttggtaccctgtctctgaggataacttgggaagaacacttcttgagcaaaatggagaggctccctgggaaccagtcttctaggacgttgatggagaggtcagagtctttgagaagcacagagaatggttgggtcctgttgaccttaagggttagagggaccaagaccccttcctgcttttcttacccctgctctcactgtgtgtgaatgtctcaccatgttggatggagcaattctgggatcatcaggcttctgggtatattcagactctgcctggtgttgacacttgacatttcgtagcttgctgtactacttatgtacttatgtactactgcttgtttcacacagtcttggtcattggctttccttccctagtgtggcattgcctttaggatctctgggcaccggcaggcactgaacatgactgcttgttcctgtttgggttaccacttccacacacacctcaaacatactgccacagttgttcttctttctagattccttcagtttcaactatgttgttaggtctacatggtttgtctcatgctttggcttaaaacagaaatattttttacaagggtcagagtgtcctacttttcctgacttcctttccttctacatctcaaggttccagaaatttcacgaggcccgtgagctgaagaatatgttttgctaatttacaaatgaaaaaagtgggaggagcatccttcttccctttctggaattttctgtcaccatgagctgtgtctccacaggctctggattcacccatcctcgtggctctgcttttctgttgagggagcacgtgctgtggttggctgctcctgctctgctgcctgccttctctgtgccttagattcctcacaggtaaaggagagacaagcagtgtctgattgcagctgacagtgatttaaagcattgactagtgtagtgtgcatgcatgcctgtaatctcaggcaggagagttcccaagaattagagaggccagcctgggtgaccatgagaatctctccagaaaccacaactaggaaaaaaaaaaaagagtgtttttttttttaacacaaaccaggatgagtttccctgctcatttggaaactgcagccgcggccagacttgagctgtggttccccctctgcggtgtcctgtgtagttgggtgtttggggtgtgctttaggtgagatgtaactccggaaggtgatcgtgaaataggagaatagtagaaaaattatctttctagtcacgaacacagtttgaaggtcacttgtgcaatgtgaactctgtcttccggaaataatgatctgaggtccagaggtgggaatcccacagggaggccatctaaacagcagcagggcttgggtcccgagctggcgtctgcccacaggattataagcctcattgcctagatattttgaaccttttttttccccctagtcctgccccctaggttttgagtttacatttatgaaattgagtcttgttatataagatcatggcattagacaggttagtgatgatagaaatccgagagaccattatttggaatgaaaacaggtgttaagggccaaggagcaagtttgcatttccctgttctgtggttgagccaggtttaagcagagctgtggaagggaggaagagagcatcgggtaagactcctgttgcctttccgttctgggcagtgggtgcccgtaacatctcctaggccgcgttgaaggcaagttgtctgtgctccccacacaatgttttcctagtgatgctgagattctgcgatttttaaagcaagtcttgaatattcattgaaagcatcccgccttgcagaggctgttagcttctgactcacttagcctttttggggtcttgacgaatgaagttttgctttttgtggctgcttacctttcacagatgaagaattcagagtctgaggaccactgtctccctgagacatttaagatgtccacctgtgtttctgagaaatggaagggcataggtctctactctttggtgcggccccgtgtaccttcctttaatgcgtgtaaagtgaaattctattacgtaatgatgtgttttgggtggtgacttaggtatcctggataaataggtagaaaagccatatcttgtaaggctgcacctaagtatcttttaagcagttctactgttggggaaggtgttccttttctgaaaagagattcccgttttgttttaacacagtaaaatccaaaacaaaattaaggcatcagatcacaattgaggcacctgactctgtttgtctttaaggtgatgaaaattttgtaaataaggaagtaaaacaggttatgcaggcaggtcagccagagcaaatagggaataggtaagaggctaatcactacttagtgtggatgtctattattctcaaagactctaaaaccttggagacaacccacaggacctcttgtgtaacagaatctgagtaactggccctcctccatccatgggaacatgactggctctggtgtagaacattgggaaaaataatacatgtgaaaaacacttagaacaacatggaaagagaaggtgttcagacaattaaaagttgttttctttgtttcgttttgtcctggagattgaacttgggccttgagcacgcctgataagccagtgtgctacagcccactccttgagatttgatttgatttcactgtgaagcaaggtcttacacatgctggctggccttcaacatgtgatccgggtggtcagtcctcttacctcagcttcctgagtgcggagataactagtgtgccaccttacccacttccagtgattactgtcttcttggggtgagggtatagcttaatggcagaggattatagaacataatccaagctgtggatttgatccccagcacttgaaaaaaaaaaatctcccttaccaattgtcattaacattaatttttgcttgtgttaagcccaatattggtttaattgataataattatgtttgccagcaaaagaaactacccagaattcaaatattcaccagaaatatgatttttctcggaagatgtctcacatgcaatgggaaatcatctcacttctagaacttttaaactactcagaattcaaatattcaccagaaatatgatttttctccgaagatgtgtcacatgcaatgggaaatcatctcacttctagaacttttaaatataaacttcactgcttgttgggtatgggggaagaatccaccattactgtgaggacctgggggacacacaagagtgagaagaaaattacagttgcccagaattgaataccacacagaacagcctggcaagtgtcctccagtcagtgccacgagtgcgagcatgtgctgcgcttgctcgtggctgttctcgtgctctctgtcaccggccactttccccactcaactctgttgaggatgcaccttagagctcacctccctcctggctgcatcgtgttatgcaggtgtttttttatcatacaggccacttccctcttgcgtggtttgtgcttagtctaccttggttacttacaatagatccttgtggtgaaacatcgtgttcttttacatttgatttccataagtctcaatgatgtacttgggggtcatggtcctcgttgtcacttgcaagggctcacatgctagagattaggttttttgttttctgtttttgttgttgttttgttttgtttttttctctctccttgagtcttttcaggtctctcagtgaccaagaaacttgcttctgatttactcacccccgctaagtgatgcgggtgtgtgtttccatcagaaacagaaatggacagagggatgctgggcacctttaacgtgtgaattctgctactattacagcttgaggatcacacctaacggtcccatggaacgtcagcacgcaccagcaccagcactgactgtctctttgtgcgaagtgctaagaggtggtgatatcaccctccaggtgcgcattgcctggctggccgactggtggtgtagcctgtttgaatggttgcaggccatgtggtaccgggttttctcccaccatggcctgggtcacaaaatacattctctatcttttcactgtgaaagtaaatgttacctatgaattccctcctcttcagtgaagtaataaaagctattgctggggacatttactagacatttataaccctcatatgtaggaggctgtagtgccaagtgcgttttggttataaaacctttgttgggcttagggagattgctcaactcgcaaggtgctacacaaacaggaggccctgagattagtccccagaacgcaagcgttaaaacccagctgtgctggcacacacgtgtaatcccagtgctagaaggcagagttgggaagattcctggagcccactggccacctaacctgcccaactccaggctggtaagaggctctgtgtcaaaagacaatggagacaggggatgtgcgcaatcattctagcttccagcagaggttgttccgcagtctttgttcttgggcactgggcctggcttcaccatctgagtgattttcatctgcaaagggacagttcccacgtgtcaggcccatgtaaggaggctgtggaggatttgtaagttcccacaggtcaggcctgttgtaaggaggctgtggaggatttggagaagcccgttaattggcggtccttggaagacgcgtggctctgacctcaccctcttgctcaacctggagcgagcctttggtatttgttcagttgggatggtggcaccaagagctttcagccagctaacacaggctagcatcactctaaggaatgcaggaatgtttgcagaaggaaacaaaactccctcttgtgcaggacattcgtttcttcccctgtgcttccttctagtgccttcccaatatgccggatttaaagctgggtgactgggccctgccttgtctcttccacttcaggtggtaacactatctcctctccactgcaccccttttgtttctcaaaccagctagacttgtttctgctgaaaacctttgttctttcctccctgcctgtcctctgttcccatggctactgtcccaaaaggcagatatgaggctccatagaaaggtcagttctctgtcttgacagtgacatccctggggggactgaagtgactgcctggctcctctggatggcaggtttcaagtgtctgctcagcgctctctgccctggacccagagactgctcagcaatgaccctgtggtggaatgaaagagccctttggtgggagactgctgtcacccactctctacacctgtcggattttatccccacccttttcccaccagtggcacttagtggtagcattaggatcttttctttgacatagacacttggtgaaactccacgctgaaccgtttatcacttgtcatttctgggacttagttatgtaaatctggcctgttaactaaccaccgagcaaagagcacttgagccaggtcctgtgctgtagaacaaacagcacattcggagccgccttttcctgtctaagccaatgcgggcatgtttactcaggggtctcctttctcagttgatgacatgacaattctttcccaccttctgttttctattcttcatnnnnnnnnnnnnnnnnnnnnnnnnnnnnnnnnnnnnnnnnnnnnnnnnnnnnnnnnnnnnnnnnnnnnnnnnnnnnnnnnnnnnnnnnnnnnnnnnnnnnnnnnnnnnnnnnnnnnnnnnnnnnactgacccccccccccatccaaaaaatgtacctacacacggcttctccagatagggcttctccagtgtctcctctaccatctccacctccgcccttccactctgtttcttcttctttctcttaaaactccaggagtgttttaaagctactcctgccagggttctcctgacattctccatgtgtcagctgaaagtcacacagttgtttcctgcttggcttcctggagaccatcttcccacccccagccccacccccacctccgggctccctggtcacatggttggcctccttttcttccatttccacctatctctgacttcagtacatgacaccccaagccgggggttttccattcttctatgctgtccaatgtcacagcttccaacttattatatccagggcagaaaggcctctctcctgagcctatttcatgtctccactgaggcatctgacaaaattctcaaacctagcatctaaaaagaaacaatacctgcttttctgtcccagactttcatccttctctttgctcgtgccagttgttagcacttgtgccccagtcttcagtctcttgcactccatattaactcctccagaacagcctgttggcttaaagttagaatctgaccaaatcttactatctctgctgctctcactgggctgatccctgccatctcatgcctggccaggcctcctaggaccctgagtttgctcatcacaatagactgacattttagaattaaagccaatttgtattactttgttctgcgtaaacacgtcagggttaatgactctacctaattaaacatcttaggctataactacagtattctggagaatgtgatcctggcagagggacacatacatacatagatcagtggaatagaaatagaggaatccagaaatagtcttgcactaactgattttccacaaaaatctaacagcagctttatggaggaagggcagtcttcagcaaatggctctggaatgactgggtatcagtggtcagaaaagaaataagccttgttctaaaccttcaaagcatttctgtgatccactttgagctaatttttaaccattaccccaaagaaggcatatcttgctgggttggtggctcccacctataatctcatgatgtgggaggctaggattgctgtgaatctgaggccagtgtggactttgtaggccagggtcatgctgggcagttactgtaccactgagttacatccccagccttgtatttgttttctagagtacatgacccagaaacacatactttgtttattacattgttgcatatctgtttccactaacagatgccctctgtgaatcctggagcttttcagccttatttatagatacctcctgatctctagaagaatactgagaagagactcagtatgtgtgagttgattgaatgaatgaaatcttaaaaagtataaaaaagaagaaaactcatagagaatagctattgggtcatattgggtaattcatttcctgggagcctattttatttttcctttaatcatctgcagatttcagtccagttccttattcttaatacttaattggaaggagagcgcccctggtgctttagtgtggaggaggaagccgggaaggtagaatggcgcatggtcagccctcctgttctatctctggtgttgatgaggtagttttggctcttctgactccagatggatttcaggtagagcaaaagcccctctcaggtcaaagtcatctgactcttggtccctgtttttggtagctttgctgatctcagccaagagtccactgtgaccacttcaggctgattgacatctatgtggttctcctgtccctgggaagcgggcctgacccctgcctttcttccctctgcttcaaagtcattgcatcagaactgggggcttctgtgtccttcaggaatcggaataataactatgtctgcaatgttttaacttgcttgatcttactagtgagacagtttagtgaaggtggatgaaacacactggtcagggcgcactgaccaggcataaatacagtcagcattgattcgtggaatggttcaatccaaacgcttactgttttatttctaaaaagaggaatctttttctttcccttttcaaggagagaaaaccacgtagttatctgccagctcacagctgacacccatattacataggtgccctcctcataactgaccttaaagagctcactgtttttatgatgtttctgtgaactttttgagcctctggcttagtagaattgagagactaggagttggacaggctccctggtagaagaagttggcctggccatcttggagattcaccgcctttatgacctaggcacgaattctttccctatctgtctccctgccagggattatgtctctgactcttagtctctcggaatcatggtagcagcttaagcccaccatcttggtgataaggggagttagcaagaatgggggttgcttggggtttggtgctagaattggctttcaacaatttactgggagtagggtcacagggtggtgaagaagggaagctacatgattagttgaacagccttgggtgccagactgaatactggtaggctgcttcatcttcagtttgagggtcggtcatgggaggtttatttacaaagtgttgggaagtgatatctgcctcgttctctcccctttcttggtagactggagaagcagctcagcaattttgcccaagatacctgcatttctcagtaacacctcaaagtcactattgtctatctgtctgtctgtctgtgtctgactatccgtgtgtctgtgtgtctgtctgtctgtctacctatccatccatccatcatccaaagctccccattctttctgtcacttctgagctctcaccccctcccctttccatgtgtatagtgaaaggtctcatgttgggaggcaggggtgctgaaaatggacacggagacaaactaaggagcaatgtgtttattgaagagttactaacgccacggactgtcagtcagacagcagcatggtggcagttctaaggagagagagctcaggccctggtggcagaggcagcatggcaggaactctgcagagaggaactggggcccgtgtcttatacttctctcagagtggaggaggttccactgtgcaagcccacagccaggcaggaggcagggaggagggtggagaacaaatggcctttgatggggctagtgttgggggctagcagactgtggctccgtagggtgcctgcactgagaatccggaaggtactgtggcctgagtgacagctggagtctaacaggtagtttcctccaggttaaaacggtccatcctgaagggaaaggggaggctaagaggctcaggaaacttactgctcccagcagggtcacctgaggagcaaaagcttgctgaggaaaggaggtgtagctgcctaaaaactgcacagggagcccacatgtgcagctcctgggagtcctcctcactcatgcagggtgggctttccggtgatgcacctgtaatgccaatagatccgttataggatgatttcgctggcctgtggtcaatgctcctcttggggtaaatagacttgtcctcacatctccctgagacaaatcactcgacactcttctactagctgggaaaacaaagtagggacactagtgtcaactaacagtgacaagctacatttaagaaacgccagctctgtatcaagaagagttcaagtctctccacatactgagaagctaaaagctgcctatttgtaacatcttcccaattttaacaaggagcgagaatggagtgaagacgaagctgcctatttgtaacatcttcccaattttaacaaggagcgagaatggagtgaagacgaagctgcctatttgtaacatcttcccaattttaacaaggagcgagaatggagtgaagacgaagctgcctatttgtaacatcttcccaattttaacaaggagcgagaatggagtgaagacgaagcccttccagggtcagggtttgccacacaggcagtactgggtcagacacacatgggcttgcctgcagtgcctataatgtttaggctaattattttttatgactcggagtaaagcactgcgcactgtagtcttaaacaagagacatgtgctctcactgaggttcttattgtgaagggcaatgtcatctggtccctgtgggacatcgtacacatgccactttgataactctagtgtcctcatgaaggaagcaatcccaggatctcttcccaggctgggtgtttttcaaattaaattctttccactagagtcttatttggaaaggtgtagggtgagtaggtcacggatggctttggggatgagctgatgtgttatggtcatgcttttaatagctgggcaaatttctcacagcaataacttaacagtaagtaattacataaaattcttagtgagagatgaaatgggaatctgagttgttattggcgctggccaaaagtctctaactagcacttaattcattatggggaaatgttgctcagtgacaaaaagtgatcaagtttgtgatattgtcttcctttttagaactcttacttttttcaatgagccctttaaatatgtgatgccacactagctcaccaagtgccatgattgggaggcccggttaatgccatcggggcagccccaccttcccgccagagattctgaagagtgcggatcttttcttgtctctttgcctatttgaaatgacccatctttgtttgggtttattgctgtcattcactaaatgctggctttcctaccctatttatatttctcatttttataggtagacccttttacaatatattgctgaattttgcatttaataatataaataccttaaaaaaattttaaagtgagaaagttaagaaaccactttggatacttagtgataaaacaacgcttaaagcagtaacccttaatttatagtaaaataatatgaatgaaatgttacataagctttaattggattattttcagaatgtcctcttgtcctaggattgggaagattgtaaagcaggtttgacttgatcctaatattcatcccaaagtcacagaagagtcacttggcctgtggctcacatgtgtggcttttccaggcgtgactcagctacaaaagctctgccttctgaaacgttgagagttgtgttaaagggctccattctgggactgtgttgaacatcatggctatttgcaaatttctaggagggtgaatttaaaattactacaaaaaacaaacacaacaaaacaaaacaaaacaaaacaaaacaagaaacctgataggttaattaggttgattgagtcacttcaaaatgtttatgtattttagaacattatgttattgcatgcacacacacatacacacatacacacacacacacacacacacacacacacacacagggagggggagggagagagagagagcgcgagagaacctgaacttatttactgtaaagctggagagaaattgttttaacattaacaaagatgacaactgtgcacctcctgtgacatgggtccttgggagccatgtgggtcatcatatttgccctgtcagggactggtcatgctgcgtgtttcggacccacgataggtcaaaactgaagctgtaacaatgaaggacatgggacttctggggtttgtttctgttttagttttttcttttagcccaaatgaattacatgcttcttcaggatcaagtcaaatacttttatttttgatttttttttttttttcctctcattcaattactactaacaggctcagccattcggtcagacaagattgggtgtgttctttcttctatgtcctacagcgctttatacatagtagatctgtttttgcccattgatttaacgaattatcagttaagtgtgaagtcctgtgacctgaagggtgaggactatagctgctgaggggaaggagatttgtctgggctgtttggagaacgcccagctcctcagctggctgggaacgaccgtaaaagtaaaggcctgtgctggtcttacatgtccagtcagcacatacttaagggccttgaagcctgtggcaagcacagatgaatggcataggctgaagtctgggtcgtgagggatctcacaaacaaattgataaatgactcgaaagtgtaacagtgtgagctgggaagggcagggaagggcagggaagctgggcggccatgctggggtgggaattgaaggacggaacctgagaagtggctgtggggggtggaggccatggccacggccactgggattgtggtagcaacgttttctgaaaacaaaaagactggggaagattatggcaggaaagaaaaatattatgcttgacattgtgtgtttggatgtcgaagagagttttctcgtggatagatgtgttaggagcctggcaccacgatgtcagagaggcggttactcagtggtactcatcagtggacaggtagtacgcaaactggagatgcgatccccaggagagacactgcaggtggagcaggaacagggccaaggactgtgtaggagaacgggtcagatgaaggcggcgtttcaagagatccatgattagaaattcctctctgagagccagctgaactttcaggaggtggtagccagcattagctctttgtgatacagtttggaaatgcttgggactaggactgtttcaggcctccagttttggaatattggtatatttacagtgacatgtgagggatgaggctcaccagtatgaaactcatgtgtttcatgcacttcttgttgtgtttcatcataagccttttgtcgtgtcaaacaccacaaattagagttttactctagtaccttgcttctgtggaaggggaagtccgatctagcacacgacgctattcgtttttcaaaaacagagatagacaccatctacatttttctgatgccctttaaaaacaaacgccaacacaagcctgttgtagctctgaatgaaagccactaacctggaaagaagtgcagcatcgtttccttccgggcttcagaacccagctcttggcttggggaacagaacaggtaacacccgtctttatcggaccttgcagatttgcacctcagaaattttgaatttgaacaagagacctaacagggaagtgagcaccctgagatcgcatctagtactggagagccctgtgctatgtacatcactgcagagagtatgaaccctcgtcagcttcggattctcccaccgtttctcaagccggagccctttttctttcctcctaagggggctgagctctatatagatgtaattattgtaattgaagagttccagaggttcttctgggccccttaacagtcattcacccctccggagtggcgcagacatctcgagtgctgacagccacgatgctgagaatgctcttcatccttgcaggacacgtggcaaagccatgtccttacacagatcacctgaataattttatataatttagtatgtttatgttttgatgataatcccttatgtgaagtcaaattttagaattttccaattggggtatcatgccagcactcagagttggaggtgtggcagcaaacttctccagttatggatagcgctaactcttagtatttcaaaacagagttcctatttattctcaaaaagtgaaggctatttattggtgttccctaagctctgagagttctcatgtactggcaggatcagagtgcataaagacagataaagaagttgggaattcacaaaaatacatggaaggattgtggtctcacaagatatgtgaacagagtacatcggtaaggctgcttcaacaaccagattagacctggtctctgtgggattcctgttcccagctcctgcagctataaggctgaggtttgagtcttctaagcatccagttatccattcctcagatatctgagtcattcctcactaagtgggagtcctgtcatctgtgagtcctgactcatacacttcctttcatacctctgtctcacatccatccattctgtgtctcaccctaactcctacccttcattnnnnnnnnnnnnnnnnnnnnnnnnnnnnnnnnnnnnnnnnnnnnnnnnnnnnnnnnnnnnnnnnnnnnnnnnnnnnnnnnnnnnnnnnnnnnnnnnnnnnnnnnnnnnnnnnnnnnnnnnnnnnnnnnnnnnnttcttccatctgtttcagtgacttaccattgctcagcagataaggatcaagatccttgaagagacctggaagcccttccactggcctggcctggcctggcctggcctggccctttccttcctgagcccctggctggcttctttcctgaccctgaactcaggatcccatgcattagaggatctttctgctgtgaccccagtcctcacaactccagttgtgtctgctcttttcttctccattggtgacattccttgtttcatcatggtgacacccaccctgtgattttagacttgacattcatgtgtggttaacagttgggcattgttcatgtttgcctgttagactatggcttccaggggcaggagccatggctgtctttgtttactcttgagtctggtctttgggggcacaacaccaattatttgtcctatgaattaactagagccacacactgaaaatgaagtattcctttgggaaaatggaaaccttcacagaaagactggctgtgtgtgttttcctctgcgctggtatcccttcccctccttctctccaggttctacagctgcctgcttctgtcagagttcagtgggtgagaggagacttctgacgtggccgtcacctgcacccttgttctgtctggctgagcatttgagcagaaaaatcagcaggtgctcacaacgctgcggtgctttcgtagctttttctgtgggtcactcctaaattctacaacgtgcccaaaaggcagggcacgcacactgtgtgcactgcagttgtttattgcagttagagtcttatactaacaatgcctgtgcttgtggaaactgcagcaggtctactagcgagaatgagagagtaccaagagaatcgctaacttcccgacagttgtgatttagactctttctctatctgtgtgcgtctcatatcttaaggaaaacattagatattacaaaacgttagtctctttgttgtcttagcaagacttgaagtttatttaatcttacaccaatttttcaggctttgattttctttttaatttttccaaaatggtttttagtgtagagttaaaaatattttaacatcaatcagtttatttgtttatttacacacatacatatgtagcagtggccagtgagaccaacggcccaaagtgttgtctctttttcccttagaaagggttttaagaggagcttcgggtgagcacgcctttgcctcctttcctttcagagcttgtgttaaggactgtccttttgcgcccttaacttccaggttatgattatgatgtgactgtggtagaacatactctttctgcaccacagcacaatcagttcaaattctcacaactccataacagaccaaaacgaaccccaaaagaccatcgcagagccgattctgatgcaattgcacctgggtctttttccaagcttgagcttgggcccactgcagtcactgacacagcagggcagcagggtgaagtccagagccctcagctggataaagttttataggaaatggcgaacaagtgagcggtgtccagcctggcaagcatctaatttgtaagctgataggtgggtgctctcaagcaaaaccaataacagtcagaaagtacacctggaactaccaggctaaccctgattagttattgctagggagtagctaggaagtaactctacggtatgggcagagacaagctatgtggttcttcttggatcttgggtgcagcttgcgttcagctgcagatcaagttctcagaccctttttcttttaaaatggaggcctgtcccaagatggaataggattggtctcttgatgacatcacctcttttgtgtcattttggaaaacaggctgtccctggtgcacagcgagactcaagcagataagctgatgttcactcgtcctgagccggagtcccaagttggcaaacttgtgaactaggtcatttgatggtgaccagtggtgtgctaccagtcaccttcacgctccaaggactctggtcacttcatgtctcccacctgcctgctcctcagtcagataaaggttcacagttccagactatgccagaatcagaaacccttgattactatttccgtgcctgtgagttgcctttagtgtcttatttgatgcttgtcagatttctcgttgtcagaacgacaagaggagagcacatttcggagaactaggggagtgtttatgcaatgcgagaagtcatgtggacgacagatacttatattgggaagtgtttcgtatagaaactgttgtgtttattgaacatatggtatgtgtctgacacgttttaaaatataccctgcaaaggcttcgagataaataccggcatttccttccttttataaaatgctctgtacatgtgtgtctgccacacgtgtgcagatagatgcacactgatcccccctggtactaggattataagtggttgtgagccacatgagcgctggtgtctgaatctggttttcgccaagaggcaaatactcattaccactgagccatctatccaaccccaactactagtattttctcaaaagtgtcttagttggtgttctattgctacaaagagacgccatgaccaaagcaactcataagaaaaaaacatttttaatcagaggcttgggtactgtgtcagatgcttagtccatggcttttatgacaggaggcagacaggcatgacactgaagcagtagctgaggccttcacatcctgatctgcagtcagcagacagagaggaagatgctgggcctggtgtaggcttttgaaaacttaaagcccatccatccccagtgatacatatcatatatcaataaagtgatatatcaataaagccacacctctgaatcactcccacacagttccactaactggagaccaaggatccaagcatatgagcctacaggtgtcattttcatttaaaccgccatgcctagtatgtagtaaacacttgggcagtatagtctctgtctccctggagcttcatctgctctgtatttagtaaagctttagtgctagatgtgtccaaatagagaagtgtaaggaacaggcacttttttttccctggattttttgagacagggtttctctgtgtagccctggctgtcctgaaactcactttgtagaccaggctggcctcgaactcagaagtccacctgcctctgcctcccaagtgctggaattaaaggcgtgtgcctctactgctcggctcttgccctctgtatcaacaatgaactgaagcaactcagagcactaaagtgattctgccaagtgaaaggttcttcctgcccacctgtgcactctctctctctctctctctttctctctctctctctctctctctctctctctcttgctctctcttgatgttccgacaacagttacttacattcctctagaaagaatattgggcctggcctggcctggccttcctgcctgtccagtggatgttgttggttgcacattacagatgtacatagtgtgtcctgaagggaaactttgtgctctcctctctcacctctgaccaatggtctctccttggtccacactcatactgagagagtcccaagtttgacatcttaagtagaaggctaaagagacagtttagcaacagttgaagggggcaagtttggggagctttctggaaaagcagaacaaacgttacagtattattaaggctacccatagaacactggtgttgggaaggttctactgtaccatcccaaaggaaatggagagggagtggtttagcgtccactcaatagatacttaaagtcggccatgtgtgacttctgcagtgggctatctgatcagataagctgattccttttaactcatctgactgaaaagattttagtattcatacaacctgttctttgaacagcatcctggtggagaagaagtcctaagagagcaagctgggggtgatgctaccgagaattttgaggacgtcgggcactctacggatgcacgagaactgtccaaaacatacatcatcggggaactccatccagtaagtcatttcttggataagtttcttcttctcttccaaggctactgtttgacattgggaggtgtagatttgcatccacagaaaacttaaaatggaatgggcagtttcttttgatttagaatacttcatttgtgacaggctctcaataactagcccaggttggcctggagcttcctctggaacccaggctgacctggaactcacttctcaggcctttatctctcaagtgctgggattataggcatgaatcacggtgcttaacaggatacctttttttttttttttttttttttttttgtgataaatacattgattcaacctttctttactttgcggtttcttttggttgcagttattgctgaactcggggtcagagtgctgtgctccaaggccttgcactggggaatggtactcagcctctgagagtcaacagagagagattcaaagggcagagcatcagtcatgtagtttgttcttcagccaagagagtgaagagtggtcacgagtacactttccctaacaagagataaatagccaatagccccagctcaagtaggcaaaccaaaaaacactttaaaaataagtaaatgtaggcatatccctatttatttatgtatgagtcttgctgtataagaacttgtaagaactgcagtcttataagaactgcaaatgaaggaaagataaaagcaggctctttttagaagccctagaaatccattttagtgtaaattctgttgagcagtgtgtgtgtgtgtgtgtgtgtgtgtgtgtgtgtgtgtgtgtgtgtctacttgtgctttgcctctttggttaactgggaggttatctgtacagagagagtctgcttcactctctggaggattaacagaccacacgttttcatagtcacagttcccagaactagcagggttgattgcatctgtgaggtctgtccttgtaaagcccctccacatcctgtcctgttcccgcaaggagggagggtggctttatttaggtcacctctctgcaagactttcctgtggggagcattttgatgcccttggattttgataccttcagtctgaggtttaaatagtttatagttacattgttgggaggttgcaggtttctctgaggccatcatggcagaaagatgcgtacctccatgaatttaagagtagagaaggaagggacaggtttggtcttcagttattgtctgaattaaaagtgagttcaacactagcaagcctctgaacaccccctcctgtatctcagacagtcatggatccgttctaaactctgggactgtggatggaaaggcttcctgccctaactctgctgttaatttttgttgtcaaaccaggtggatcaaattttgcatttaactttgccgaatgccaaacaaacgctaatcattgaatagtattttttttttttaattctcaataaaaagtcagcttttgggaaatgagactttcacggatgtcctataattcttaatgccaactccctttttatcccttacaggatgacagatcaaagatagccaagccttcggtaagtttgtccaaatatcccaaaggagaggtgtgtagaggtaactatgcatcttcatgtatttagtaccaaaatggggcaacgatcacagcctcttcagctctttctaggcaaggtgaatatgtaacttactggttttgcaaaagtttggtttgggaggtttttgtttgttcgtttttttgttttgttttgttttgttttgtttttgtactagtccatgtccttttgaggaaagcttgtgtgttactttgtacaacagaagtattaattttttaaacatcataattgccgataaattaaagtccagatgcatagctcagtggaagatacttgtctaacatgcatgaaaccctggctttacttgctagtgctagagtaagttaagtaaaacggtgcctctgctctgaaagactgaacgtaagccgtatcttgagaggactaggaactgctttaagctgagtcctgctttcctccctaactctgatgaagcccagaccgcttccttctctgcatccctgtcttcgtaggcatccaggaagggctagttttacactggcgtgctcattaaatctagagtaagaagttatgagaacagccagctcaggttcctgaaaagtgtaagcaggaaaagttaattctggcctggaataaaggaaggttttgcttcaaaaatggcagcaagaaaactcagcttttctatttttgtctgtgcttcttctcggtggagaggccacacatggcgggcgagcttctttgagcttgcagtaactactggacaggcagtccactgcgaggcctctgctgttttcagtgtgtagcataaagtgtgagcacaaatgccgtgattactccaactctcacccacagcaagaaaaggcctgtgtgggcttccccgggcacagcaattacacttctgtttccccctgttcaaaacaaaggacacacttaacactagtgatagtagtgcgttacaaagatttaaaaaaaaaatggtgttgggggagggaaaaaagaaaaggaaaaaaaatggtgtttagagtttgaatgctgtctgtgaccattgctcagaacgtgacttccgtgtcttctgtggctgctttatcgccagctgcagttgtagagcacctaattgttgtccccttgaggtctgtcggagaaaaagtctgtttctgtcctcttacatgtttagtatgaagtggttctgttgtgagtcatccgcaggaagacaaggctttgcggaggtttctttcctgtaaccgtagtgcacgagcaggtgtgcacctcctccatttgttcttagatgccttcactgtgcagctgggcatctctgtccgtggagtgctggcttagcctgtgcgagagcctgggttcagtttccaacaactggctggctgtcattctacttacccctaatcccgagtgcttgggaagtgactacaggaggactagaagtagccggtggctccatagtgagcccgaggctggcctgggatttacttaccagcgcctgtcctaaagggtagtgtcaaggggaggaacccaagtgtcctcgctgtgtttgctattctctgttttgttttagttttctgtttgaacttgcaatctctttgaggtttggagtggctggtgaacagagcacacttattaacatcagccttgatgaaagtccttctgtccgtgtttgcaggaggggacagctcgcagtaacacgtcatttcatcatgtgtgatgtactggtcagagcctctcccgggtctgcattgactcgctgtttaaagcagatactcttactatcaagattttacaaagggatgactttgtggtgtcagcaaacaaataggacccctgtttccagctgtgactttgcttaaataggagcacagatggaagaaagtggggtggcccttgctggtgatttgagaggctggaagtaagtgacacagaagaaaatgtgttgcagcttttctgggtgctttgctatttctgccaaacaatactggctccttaaggatttctcggggtcgtgtgtaatcatctgtagctggagaacgtgttctgtggtctgatgtttttcagtaaacacgatgctcgggactgagctagagctcagctgtagagcacttcacaaatatgcataaagcccaggtgtatgcatcagtcctcagtgttgagaaaggaagtgttacttaaagcatcgagtttaatcttgaaaaagatgtattagcgtgaacttgccccaaagaacctacattgccaagttaaggtatttatagacacagaaattacatgtctttaagtgtatccacagcaaccaaatttgctaatatagagggtataagctgtattggtggccttccgtgctattaactttcaaggccccatgatatacaaggttgtatttgtctctgaggtccccagacctcgaggccctgaagctctggggaaccgctgcatgagagtcacatgcccagcctctggcttgtcagttgtggtctcttaggttccaggagacactggactttcaggaaggctcccctgcgagtacttccaataaaggagagttctaggttagatggatttaagttgggataactgatttgcaaagactttggagacttggtgtgtggttttatatggaactaatcatgatgtatactggctcacatgatgtttgtaggccattatgcatgccacacacagtcgctatcctttttactgtaagttggaagccttccaggtttcaaggtaagtaggtggcagagctcattgctgatctgtttgaaaagttctctgcctaccttacagttgagccctgcagagaaatccatttctgtaccctaatgctgagtggtgattacagcttaaactcaagcattctgggttttatggctatgaagaaaatagacaatccaaaactgtgtggttttttcttttttaagttctattttttggagggtcatgattgccagtgatagtggttgtggtggcatgctagcagcattttatttacgttacatttaacattttaaaatatttatttgtgtgtgtgtgtgtgtgcgcgcacatgcttgtgcaccacagcatacacacagactttagaggatagctttcaggagaatcgatactccttccaccttgagggtcctagggatcggtgaagctcaggttgtcatgctctgaagcaagtacctttgcctgctgagccatctcgcccgcccctgtgacagcattttaaatggcataggcatgtttgagcctcagcaatatttaacctgacatcggtgctttttcattagcaatgcagacaccaagacaggggcgtcaaagaaggccacctgaagttgcatggggtctcctgaaatgcatccatccctgcgtgtgtcacgagctagtggcctctcctgtctgccttctctcactaacttcccagcatgccgtagtgtcctccagtgagccctctggtgtctcacatgattgtgttccttgtaactgactggtattgtttgcgtatttaattgtcataatcactgttaattatactcacgggacataatcctgtggtggctgtgaattctatagttactaggatttaaaattgctaaaaacaatagcagatgtgaagttttctttttaagtgacattttttcttcccccactgtgtcaggaatcttaaaggtgtccaggttggtgtgtgctgccctgctgctttgctctgcgtccctagaatggatttgcctttcctgggagtctccctaacatgccttgcagagacaccgctgtgccttgctgcaaacagctgcttgctttactgacgttttttcgtctacagagtgctatagacatgattttctgatgggtcgagcttgcctgtagctgcttctgttgaagcactaacagttttgctggtgtggaacataacaagagtgttttctaacatctgctaaagcctaactgtgtgtgcttccatgggctgagtttggaatggtttgagaatatatgcattttttttatggtcttcatgagaagggctgtgcccagaaactgctggaaggtaaacactgagctttatctgctggttaggcagaatggtttctgagttaatcgggtcttcctggtcctatccggtgagttaaagaagactcagaaaaggtggtctaacacgtgacatgacaattcttattacttcattctggttggcacactgttagtataatttaggtatgtttttatgccctgtcagttttgaatgaaataaatgacatttatttcatattctatcctttgaagaatttcccttccaaaagacagtgacgcagtcttctatgtgttcatgagattttatgctgaagtttccgtttttatgtcgaagtccttaaaagtgttaaaagtgtgaattgttgtatgtattctattaattaacactttcaaataatgaagtttatgttcttaagtaacttaaatataaattttactttcttgaaaaatggtgaaattaggctctttagtaagaagaatttgggcacaattttgccttttaacaacttttaaaagatagagttgaataaagtaaggtgattcttatcttaaaacaggatttcagtcaggggaataaatgctcagacgggaccctaactccatggtttcttttgtgttccaggatactcttatcactactgtggagtctaattccaggtacgcagtgctgtctttgtttcttcggttgttttgttttgacataaggtctcttggagggctcaggagccagagtttcctgacctccccatctgatcctatgcttggatccccactctgctcttagcctccagactgggcgtgtgctcctagaacttcagggtgttccatcctagactgtcagctggggctgcctgcacttcccacagtgaccccagataccatcaccctctggatatatccataccaaggaccatggagaacaagtggggttccttatccccgtggcagccagtcccttgacacaagagcaccttttaagactggtcattatgtttctgcaagcttggctcggttttcagttgttgttattcaagctgagcccactaatccaagtgcagggagactctcctgttacaggggacagatttcctcgccgtattccagcccaagcttgttttttttggcagttctgccgtgttgacctatataacaatggtcttcttgttgttgttttcatttttagactcaagcccaaagctacacacctgtatttcattctgtcaaattgaaccgcccccctctcagtgtgactgcctgctcggaatattttagaatacataccaacttctttaaactgcaggttccctctctctaaagtgaagctgaaaagcctcactccatcccactcatttggagattatacttttaattctttcagactttacatcttttaattgaatttgttctttgagtgtattgatacatgaagattatttgagattatgaggaaagatttgtgtatgtattcttgggtgctaagtgtaggtattaaattttgtccaataaaaagttgaagtatagaaattgaaatcaaatttatgatttcattaaagctcttccaagccacatccttgattttacccatagtctctaatgtatcacctatagaaagcttatacacactggatgatgtataaattagaccagccttggaatttgggagtagaccaccgactaagtacttaaggcatggcatttctcgaatggtttaaatccatctactatagatgctaagattgggttttcagaggaggatctgagaatgataaagttgaggctgggtgcagcctcagaactcaggtttctggttgtctattctggtgtgggaggtagggctcttggctgcagaggttgctgacagcatactcaaaatgagaacattgatctgattctcatcttagtgacattaaaatgcttgtttagtttatgtgggagaacaaaaggtgtcaggacctttcccctttgtgggcttatgattgggaacccagagtttagtttcgagcagcatctgttgaggaagctgttaacagctctctgtatagagtccatggaagatgatggaagcagagcaaggtgttagtttctcatggtgacaatagtggagagcagcgaggccagctctctagggcatgcattgtgcacaagataatgttagcaaaactgagctgcccttttttgccaaagtggttctagaagtaaggaaaatatgctgtggtagttttccatcagaggaggcagggggtgaggtctctgcattgagggtcactcaagcatctttttgctcatgtgtctttctagttggtggaccaactgggtgatcccagccatctcagccctggctgtagctctgatgtatcgcctctacatggcagaagattgacttgtctctccgaagccgaagaactaaaagactgccccagagcggggagaaaagaagccagtgttaatcacttccactgacagaaacctccccctgagaacgtaattgtaatatatctgtttccctttcctcctgtgctagtagaacaaacaagggactctttgtactcttcaacttttcaaatgtgcctttttactcaacttcatggtgatgtttcttcactacataatttacttattgtaaacacgatctttttaaaatatatctggcttgtaaagtataccatatgtgtctgtctgtttggtgtattttatttagtgcttagtgtttcagattatttaacagaattgcttaatgtgctaattattcacaccctgttgtctgtgtctcgaagtaaagcagcagccctggtgctagcttgttcttgtcttaattgctcagtggtaatcgcaatcagcctgcatgtgcctatttcatgtttctgtattgcattcctatctctgacaagataactgaatgaagcaaaggacagaagagaagaatgtaagtctccacaccgccaggaggacttggtaggggttagtgtgcaggtctgtggtagcatttttggatagcagagagctaaggacagaaacagaagtgtgttattgtcttgaataatttattcctgctagctaggccatagaggcaaaggttctacaatgtcctgagtgccaccaggtgggacccaagtgttcaagcacataagcttgtgggggtacctttcccatccaaactgtaaattgccaatgtttttcaaaattaagagtcagaaattacatctcaaagactgataattttctacttgaaatgcatgtgaacatggcctatgtggtctataaaagagacagcacatgttctgtgtgtggcaaacaggaacacaaaccagctcacgcactgacgaagactcttgttactgcctgttctcagttgaaacgtcattccccagagactctcagtttcataaccttggagttctacaaattccccatccagagacagaagcagtggatgcactcttcttaggaaatactggctaagtgagtcatcaaagcacagatctggagatacttattttgtgttcgtttcttgaagaacttcagctgctgagtgaggctggagagtctggggtgcctctgctcatttccacactgaaccctcaagagttggttccgatcacgaggcttccattgctgtctctgccagcatattgttaatatccatgacttatcatttgaaatgtagaaacccaagggagtcatttgctagttgggaaatgaatctgtacgcatctgtgattgggtaaccagccttaacagccttaagaaatagcacatcagaaaggaatgttcctgttgctacagagcatgggttgtttttaaaaatacttttcagttttgtttattgtatgtgcatgagtgctttgcctgcatgggtgtatgcccaccacatgggtgcctagtacccacaggggccagactgtgggaactccttgcatgagttatgagctctcacctgggtgctgggagccgaatccatgtcttctgcaagatcagcaagtgctgttcactgctgagtcatctttctcacaccactgagtacgaatggttttatagtcagtggcatgcatccccctttcccaccattccatggtgctgtgggtcagtgcaaggccttgtgcatgctgagtatatgctgtgtcactgagccatctctgactccttcagtgttgagagtaagtatacatcaccatgtccagattatacatgggctgggaatcgaactcatgccctcatatctgggcagcaagcactattttccactgggctaactgtagctaaagctaacaacgctcattcttgggggatgcatcatagttcatctaagctgtcagtgtttctttatgaaggaacaatgtagtaccgaggaggaattgctttatattatagtttgaacatttagagtttgtacagccaaaatctcaagattttgtgtgtgtgctgcatacacacaagtccttggtcatgtgtacgcgtggagaggacgtgagatgtctcctctagcgttctgcctgttgccttgagctagggtctctcatagaagcagaagcttgacgctttgcttagcctagctggccagtgagctctttggattcacctgtctgtctccatcttccaaagctggggttacaggcacaggcaactgtggattcgaactctggtcctctgcttgcagagaaagcacactggcctactgagccacctcctcagtcccccattcctcccatgttaatttataatctttttcttctactgtgttccattagagtttaaggggcttccatggcttcacattgctctttattactgtgtcatatcatagtggagagtgggcagaattccatggtatgtgcagcagcctctgtgttcccaggaggaacccagtccctggaccaggtatagcacatgttccattcctctgactcggtgacttcctgtgaatactgtgtggaacagatcagtctcctcgtccattgggtgtctggacaggacctgtagaagctctggggagtgggcgtggggggggggacagttctcttatacggtatccctttgaagggtgtttggatccatttccaaattctgagcttctctgtggaactgtgctaatgtcctgaggctcttctaggacaaagtaactcaaactctgatttaaaacagcacagatgagtaattctaatagctctagaagccaggctcttgacagaagctttcaacctggttcctttaagatggacacatttccagtgtttcttctagcttcctgcgatacccttacaagccctcaaatgacattttaatttctgcctcatttactaatcagtgaaatttagggtcaccctatgctaccgtgaccccatattagtgatattagtgtttgtatcttcatatctctgtattcacacacagtcaaaggacttcttgtttttcagggacacaagtgtaatacaatttccactccctttcctttcctcttctttctcttaataggaatcccagagcctttccagtttggccaagtattctaccactgaattataatcctgggcctgatagtttaacttctgacttaagtaaagaacattgtttgtttgtttgtttgtttgttttttgagacagggtttctctgtatagccctggctatcctggaactcactttgtagaccaggctggcctcaaactcagaaatccgcctgcctctgcctctgcctcccgagtgctgggattaaaggcgtgcaccaccacgcccagcataaagaacattgtttaagggagtgttagtggacagcaaatctttttgttgccaggtggtctgtgttggtatacattattgtgtgagctctgcacctaggtacactagagtctcttgaatcagattgacctaaatataagtctactcaaggatgaagttatcatgaatgccatcaattctattcttcatagagaagaaaaaagcgaaacaatcatacttattaatagactgggtcccctgggggcagggcataatgcaaaatatgcagataaaaaaagactctgcaattcagaaaagactaagacttgctatgaaagtctcagggcccaagcccaaatccccaaatcctatataagctgctggagataattatgtgcacttgtgaccctagcactgtggaggtgttggaaccaggatcactgggttcctccaggtgcagggagtggcagtgtctcaatgcaagagagttatacatcctacatcttctgaccttcacagcgtgcatggaggggcacacccacacacatatgtatacactgcacccatgaatatacacaggttaatagaacagaaaccattaaagtgacatatttgccatttttaggttaaaaagttcaacttgttttaatgtccttggagccacagagaattctgcaagtagatgaacaattagaagcttgagtagcccttgcgtttcctcatcgtttggccattaccctgtgtaatgcctactctgcttctgaaagctcttgttttgtgatctcaataccttgttgctgaattgatttattttctgtgattatacctgtcatgctttgcaacctaataacagtttaggaacagtccttttgaacatcagccagacgagcaagatgcattatggccatgtgggcttagtaggtaaaggtgcttgcctccatagaaacttggtctcttaagttagctcattaggtcatggtagagcgacagaagtgactcccacaagttcctctgacttccacctgagctgcactgttaacatcacacacacacacacctaatagtatggtcagtgcatggtatagcatatctcaaaatcggaaagaatatgaagtagaagatgccaaaggctacattttgtgtaattccagtattcagagcaggcaaatctgtagacaccatggttttctagaccttcaaaggtcagctggggagcaaagatagtagctggagatgggaacagagtttcttggagaataatgaaagtgttctgacttcagctatggtgatggctgtgtggctctaaatagtctaaaagccattggtgtgttttacatgaattctatctcaacatagctcaatttggtcaagatatactcacatctgggccctagaaccatactctccgctgttcttacccccagggtcccagtccctttcactccagaacggaagtcctcttctccatgaccctccctcccctgtgtgcttcctgctgtcaccaccattggaagcagtctcctttatggctgtgtgtgaagctgaagaagggactttgccctctgattatgttagagctaaatcggtaacttctgcaactgagtgtaaactgtctgcagtgtttgcagttgctccactggatgttcatctctctgcctgccctcatgccacagcctcctcccaagcccacagtttttctctctgacttattactgcaagcactactaccgagccggccctgatctgctcacgccattgtctctgcctgcactgtgttcctgagagcttagttcagttcttgagatacaggtggtgcttcttatctggatttccaagctacgagatgattgatgtctacctggtgtcccatttttaatctggatctctgatcttgcttttgccattgtctttaagttactcttggttgactatctggatatggcaccaagttcagggccaccctgaactctccaaccgtttagggctggttgttcttagagttgcagacagatggtcagttctagactctgattgttggagtgcaggtgtgtttagctgcagcagttgcccaggctggcaagaggggaagggaatgctaatatccataccatagctctccagatcttgttggcttgtgaaatactgtagagatggaggtagtgtttatcttgaagtctgtccaagaactccagggtgagggctagtagacgcttatcagaggcaaacacagagggtggggcctgccccatgctcttacagctaaagaagctctgacctgagccccatgacttctgttatctttgctctgccagtgtctcatgatagcaactggacaaggtctcagggactgagtgtctcagggtcagggaagttcacatttcacgaacagtgcccagtcctgactctgctccacttgtcccaaaccacaagtggcactctcgtcctgaaaaatggtgattgtatcagcatcgaaaacgtcctactgaggtctggcagtaggaaagaacacaatcttgtttattttgaggcacatgccattcatgtgcacagcactgagcacctacctggtgggccccaagagattgagctatagtaactgatgttttgaattgaagttttcctgaaccatgtttccttcagggagagcatgtgtggctatggcgcttaaagactaactcctgttgttgtgcatccagtagtgacctgattttctcagcagttggctttcctgttctaagctaagagactctaatcaagacatagcagagacgagcaaggcactcttctctatgtattgaacatcatggcaaatccagtaggaataaggaactttggacttcatttttttttttttgctgttgtttatttttgagatttgtaatttaatcataacattctctctcttcccttccctccctccaaatattcccatgtacctctcctcactggccttcaaacttgtgtgttctcttttaccatcagttgttattccatgcacacatgtattacacacacacacacacacacacacacacacacacacagatacacacatttctaagtataacccattgagtacatgctaattgtatgcatgttttcagggctaactggtgctggacaaccaattggtgtgggagttccctcagcgtcactccacattgttgaaagtccccttccctcccttcaaagtggaatgaagctacaggaactcccacaaattcccatactagagcaaagaccatgttctgtgcctcctaggaaggtcggacattatgcctatgaagtctcacaacacaaagcctaaacatgtgttcaagaaggatgacacaccaataaacatgctaatgtgctgagggagagcccatgagccccagccctacaggcagctaaggaaagccgaaagtgggagaaatagtcttcccaaagagcatactcactgtctatccaatatcaatggtcagcccaaaaaacacaagtgagtattattatacaggctgagtaggttgtacttacttagttgggaatgtttgtatgtatgtatgtatgtatgtatgcatgtatgtatgcatgtatgtatgcatgtatgtatgtatgtatgtatgcatgtatgcatgtatgtatgcatgtatgtatgcatgtatgtatgcatgtatgtatgtatgcatgtagcaataattaatgaagaagaggccatgaattcgaaaaagagcaaggagtatatggggggctttggagggaataaagggaaggggaagtgatgaaattatatcataatattaaaaaataagagaaataactgaacaaatatttttgtagcagcattcctggagtcccacagctttccctggcctgttaaagtgcctccctgcccctgatgagtaactttggcaaccccttaaagccttcagaagcattctgcttcatcaccatgggaacaccttttctttttatttgaagtctaaaacctgcttactgttgtgtgtatgatgtgtataggcaggtgcgcacacgtggagatcaaaagataactctgtggagtaggctctctccttccacctttctgtggttctgaggatcaaactcaggtcttcaagcttaagccgcaagcgcctttacccactgagccatcttgctggcccatgtacttttttattttttgggttataggacatcaattagcgtaacagctgtatagaaaagcaaaataaggagttgggaacaaatacacagaagagctgttttgttagagcaggaatgcaggctacacgggggcatctacttgtctacaccagtgtgagatggccattgaccctcgtgtttcagaccatgtccctggtaggttgcactgagatggatcttcagaggtttttctgtgtaggctgttgaaggaagactgattgtctttcaataccttaagttcaagttatgtatctacatctgtgttctgatgctgtgtatattgattcgtgtataacctactgtcagccattagcagtgcttgttctcaatcagtgagagaccctagtgaagtgaaaacttaagggctttttaagaaagtcagctgtgttagatagtgttttgttgggacaatcaatcaggtggagaagtgttttcttgaaatggacacaggtgaaaggctaaggcagactcatgaaggaacattttattgaagcagacacaggcaaaaggatgtcctgttaaaataaacaggaaaaaggacaccagataaaggatctttttcgttaatgacatgtatgtattggtctgacctcttttttttttaattttttaaaaaagatttatttattgttatatgtaggtacactgtaactgtctttagacacaccaaaagagggcgtcagatctcattacagatggttgtaagtcaccatgtggttgctgggatttgaactcaggacctatggaagagcaatcaagtgctcttaactgctcaaccatctctccagcccttggtctgacttctattgtgtagttgtgctctatttgttgggactccatagagaaaaccgtgccaaaacacttttggtggtgtgttatagttttgtttgttttttgtcttttttgtggactctggctaattaacagagtgatgtcagctgagacagatatatgtgctgagacaagacacgtgttgagggtatgtgacaagacacgtgttgagggttgtagggactataaatagaacttgatggacaatgactgagacagggctagacttgtttatagagctagctatacagcgcttgttagtctcatgccttcactaatcttaacttccctgagagagacagggccaaaaacatttttctgtcattcctccttggtcccttctattgacttatgtcgaggctgaggcctagttatctttactaggtcatgtcactgctgttgttaacctgactctgacaaactagactattgatatatctataaaatatttataaatagattgagctgtcactactgacctataaactaaactatagatttttgtttgttttttggtttttcgagacagggtttctctgtgtagccctggctgtcctggaactcactctgtagaccagggtggcctcgaactcagaaatccacctgcctctgcctccggagtgctgggattaaagatgtgcaccaccacgcccggccgctaaactatagatttttaaacaacatagatgagagttctcccacccaaaaaaaaatttttttaaaacaggtttatttcccccatagtctttcttttccattacttctagagggtggtggttaaagcatttaaaaaccatcattaaaaataggctttaaaaaattaaaattataccctagtagctttctggctactgaatgaggctttaatgagtggcacatgaaatctagagcagcaggtgtgtgggtctgttgcggccggcccgcagctcacaacgaacggtttaactgagatggcaactcaggctgaaagagaagaactagacgggcggaagaaagaacgaagccaagtcaaaagtcactctgatcaaagctcaatttttactgttgtaacactcagttatgaaggaagggggaggggacccgattttcaccaaataatctcgggctctagtagcagggtgagcacgtgatggctttggaacagcaaggcggcaggtttcagcagtgggcgtggcagaacgaatgaacaggaagctccaccccagagcaagcaggtttcaggctgggggaggggagactacatcccctcccttttgttaacaaaaaataaaaaaaaagaaaaagctgtcctgaggcaaaaaaaatttttttcactgcctcccaccccaaaataaaaagccaattggccttgtactacagagccagtcctcacccccttctccctgtttcccgcctgtcatccaaaaatgtggaaaaatatcaactcagtgttattcttaataaagtgtatttcaaatttgttcagccaaacttagccaaggttccaacgccctacttaaaattcaactaaaaagttacctattcagtactaattaacattataaagtcagagcctacagctccaggcttttctgttagttgcttactaagataaaaaggacagtcttagccagatacagtttaccattaaaaaagttagaaaatcccacaaagacaggttttttctttagccctaaaattgaggcaaaacaaataaacaaaaagctccaccccaaaacaaacaggtttcaggctaaaagaaaaaagactacatgggtcaagatagttgtgccagagttagacatcccaggcatccttttaaatagcatgtatctgtctgtctgtctgtgtaaaatagtaaattgttctaaaatcctttgagccaatccctaaaggtcaggagtcactatttataaatgcctttgcccattcaagggaagaatattttgaaacagct

SEQ ID NO: 856 - DNA, 478 bp, Mus musculus
tcatagcacaaccctgcacggctgtgttgcagggcccggtagactcactgttccgagatggccgggcagtcagacaaggatgtgaagtactacaccctggaagagattcagaagcacaaagacagcaagagcacctgggtgatcctgcatcataaggtgtacgatctgaccaagtttctcgaagagcatcctggtggagaagaagtcctaagagagcaagctgggggtgatgctaccgagaattttgaggacgtcgggcactctacggatgcacgagaactgtccaaaacatacatcatcggggaactccatccagatgacagatcaaagatagccaagccttcggtaagtttgtccaaatatcccaaaggagaggtgtgtagaggtaactatgcatcttcatgtatttagtaccaaaatggggcaacgatcacagcctcttcagctctttctaggcaaggtgaatatgtaacttact

SEQ ID NO: 857 - protein, 117 aa, Mus musculus
MAGQSDKDVKYYTLEEIQKHKDSKSTWVILHHKVYDLTKFLEEHPGGEEVLREQAGGDATENFEDVGHSTDARELSKTYIIGELHPDDRSKIAKPSVSLSKYPKGEVCRGNYASSCI

SEQ ID NO: 858 - DNA, 534 bp, Mus musculus
cccggtggagctgggaatgtcccgggcggaggcgctcagacctgatcatagcacaaccctgcacggctgtgttgcagggcccggtagactcactgttccgagatggccgggcagtcagacaaggatgtgaagtactacaccctggaagagattcagaagcacaaagacagcaagagcacctgggtgatcctgcatcataaggtgtacgatctgaccaagtttctcgaagagcatcctggtggagaagaagtcctaagagagcaagctgggggtgatgctaccgagaattttgaggacgtcgggcactctacggatgcacgagaactgtccaaaacatacatcatcggggaactccatccagatgacagatcaaagatagccaagccttcggaatcttaaaggtgtccaggatactcttatcactactgtggagtctaattccagttggtggaccaactgggtgatcccagccatctcagccctggctgtagctctgatgtatcgcctctacatggcagaagattgacttgtctc

SEQ ID NO: 859 - protein, 98 aa, Mus musculus
MAGQSDKDVKYYTLEEIQKHKDSKSTWVILHHKVYDLTKFLEEHPGGEEVLREQAGGDATENFEDVGHSTDARELSKTYIIGELHPDDRSKIAKPSES

SEQ ID NO: 860 - DNA, 750 bp, Mus musculus
cagacctgatcatagcacaaccctgcacggctgtgttgcagggcccggtagactcactgttccgagatggccgggcagtcagacaaggatgtgaagtactacaccctggaagagattcagaagcacaaagacagcaagagcacctgggtgatcctgcatcataaggtgtacgatctgaccaagtttctcgaagagcatcctggtggagaagaagtcctaagagagcaagctgggggtgatgctaccgagaattttgaggacgtcgggcactctacggatgcacgagaactgtccaaaacatacatcatcggggaactccatccagatgacagatcaaagatagccaagccttcggatactcttatcactactgtggagtctaattccagttggtggaccaactgggtgatcccagccatctcagccctggctgtagctctgatgtatcgcctctacatggcagaagattgacttgtctctccgaagccgaagaactaaaagactgccccagagcggggagaaaagaagccagtgttaatcacttccactgacagaaacctccccctgagaacgtaattgtaatatatctgtttccctttcctcctgtgctagtagaacaaacaagggactctttgtactcttcaacttttcaaatgtgcctttttactcaacttcatggtgatgtttcttcactacataatttacttattgtaaacacgatctttttaaaatatatctggcttgtaaagt

SEQ ID NO: 861 - protein, 130 aa, Mus musculus
MAGQSDKDVKYYTLEEIQKHKDSKSTWVILHHKVYDLTKFLEEHPGGEEVLREQAGGDATENFEDVGHSTDARELSKTYIIGELHPDDRSKIAKPSDTLITTVESNSSWWTNWVIPAISAVMYRLYMAED

SEQ ID NO: 862 - DNA, 444 bp, Mus musculus
gcacaaccctgcacggctgtgttgcagggcccggtagactcactgttccgagatggccgggcagtcagacaaggatgtgaagtactacaccctggaagagattcagaagcacaaagacagcaagagcacctgggtgatcctgcatcataaggtgtacgatctgaccaagtttctcgaagagcatcctggtggagaagaagtcctaagagagcaagctgggggtgatgctaccgagaaactgtccaaaacatacatcatcggggaactccatccagatgacagatcaaagatagccaagccttcggatactcttatcactactgtggagtctaattccagttggtggaccaactgggtgatcccagccatctcagccctggctgtagctctgatgtatcgcctctacatggcagaagattgacttgtctctccgaagccgaagaa

SEQ ID NO: 863 - protein, 118 aa, Mus musculus
MAGQSDKDVKYYTLEEIQKHKDSKSTWVILHHKVYDLTKFLEEHPGGEEVLREQAGGDATEKLSKTYIIGELHPDDRSKIAKPSDTLITTVESNSSWWTNWVIPAISAVMYRLYMAED

SEQ ID NO: 864 - DNA, 271 bp, Mus musculus
agttcttaggagaagcaagctgggggtgatgctaccgagaattttgaggacgtcgggcactctacggatgcacgagaactgtccaaaacatacatcatcggggaactccatccagatgacagatcaaagatagccaagccttcggatactcttatcactactgtggagtctaattccagttggtggaccaactgggtgatcccagccatctcagccctggctgtagctctgatgtatcgcctctacatggcagaagattgacttgtctctc

SEQ ID NO: 865 - protein, 34 aa, Mus musculus
MLPRILRTSGTLRMHENCPKHTSSGNSIQMTDQR

SEQ ID NO: 866 - DNA, 58686 bp, Homo sapiens
aaacaatttctttctaatcccagccaatctgatcacaaataaaacttccttcataaagcccatcttctataaatcctcttcaacttgtttagaactttcattattttcccaagcccccattcttagtcctatagtttttcttttttgtaaattttggaataactaattatttaatctcaggacaaaaatgtaccacttaagatttttttctcatacaaagttatttttccctaaattcatattttgattaatagacctaaacatatttagtatttttataaaatttaagaagccaagaaagaactttgatgtatttaccaatttggctcaattttggatataacttggtcatttaatgagtattattacttaatacaactttaaaattttaaattgcatagaagtttcatttataaatgttaatttcatttccgattacctaatttattttttagtaattacacctagattacttacgaaaattaaaatattagagcaagtcactattttattttttattaaccaatttcatagcctgttaatatccagtgtttacctaaggtgaaaccttaaagtttaatacatgggtatcctgttcttaacccagaaaatacagctgtttttattaaatcaacaatattaaaccttatcaatcaaagaattgcatacacaaacattattttgttttaggctgggtttatagctttataaccttaagaactctagcagaggcaaatataaaactgaacaataaacccagccaaaaatgttgacaattttgaagacttttctaattttattttatcaacaatttaaaaaccaattaatttatcaaggatttgtttaagtaaggcaaagcaaaaatatttggggttgttacatattttatatgagtacatattttatctaaatagaattccttaagggatttctggcggactacaccaggttttatcatgtagatgcaacacatcacacaatacatgtatatatgcataaatacatctaaacacatacacatacatataaataaagatcttacagattttattttagaattttagtcatgagatattaaaacatacatactggtttcctaaaaagcagttgaattgaaattatttcctcacaaactgggagaaggctaagcttttaacttgttgtttgtagtcctgatatggctgtgaaacaaattttgagcaaagcagtttgaggcagttaccaacatagtggattggacaaagagtaactgtggaaatgtgtctgaattacgtgaggaggggtagaaggtaagagttactctaacaaggtctgtacagtgttttcttgttctcaattatttgtccttgaagataaaaatgctgccattccttatagtatagtgttttacatgagaatttaatctttagcttttaagaaacagcacgaaggtcaaaacaattttattttatatctgctggtttcaagtgtttagctattcaacagaatagcttagctgttttagaaaaagaaagtttaggttacaaaagggtgaagaggaggaattgtaagaaggggaggggaagatccagagaggaaagcctcccagctacctttgagacagtattttgtagttagacagtctttgagtgctgattttttttttttgcctcaaagtatcaattgaaatctaattcttatttgcagtgtatgattttatagctgtggttttttagtttagttttaagaacaatagtctgtttgaatgatctctgtaatgtttaaacatgttaccaggtggagttaaaaaaaaattttgccatgcctctgaactttgagagcccatttgtaactaaatttatctaggtgattaagcacttgccaattagatgcaagtgctaataaacaaaggccaagtaaatgcaagaactgatagaaaataaagtacatatttaccaagaaagatgacagtcttctccaaatgaagaggaaaattccctcatccaaacctcaaagccaagatgagtcagctttggaatcccacttcagataccaagtatgtccaagtcaaatacaatacagaggtgaatctaaaacgttttatttgggaagcaagaactgcaagtccaagcatacacgagtggtctttggtatgtccaacgaacaaagggaaagtttgaggttttataaaaaggagtcacatgtattgttctgaaagttcattagcacttgtaaagttttggggacctggcaagttctgattggtgagtgttggtggtgggtaaaaagtcttatagtagaagcaggttgtttcaatagctattagataaaactggttttaagttaacaataaccagtttctgtgggtggggtttcagacaattacattcttagggtaatatatgatgtttcctgagtgcttttctcccctggcctctcaactttgttttaattgggcatgataagaatgactcaatttatatgatcaactttcacagtggcaatcaggtttggtactattggtgggttcagacatctactggagtcttagaactattccctgaggataaggggggcctactgtgggcacatacattatacaatgccaatttccttgttttgatattgtactatagttataaaaagatgtaaccattgggggaaactggatgaagggtacacagcacctctactatatttgcaacttcttgtgaacctacaattatttcacaattaaagatttgaaatcgtttcaacatatttttgttggttaatgtgaaataaaatatttctatattatatatgaaccatgactgattagtatataatagtacaaataatttaccctcttaacactacttagtacttagaaatatctctgaataacaaaatgttacacttggaaatgtctgcttgatatgaaaaaaatgtgatcattttggaatgcttaaaaaatgtgtgtgtgcattgtcacgtgtgtccgtgtgaagggaccaccaacaggctttgtgtgagcaataaagctttttaattgcaggtgggctaagtccaaaaagagagtcagcaaaggaagttagggctggggcagttttataggatttgggtaggtagtggaaaattacagtcaaagggggttgttctcttgagggcaggggcgggggtcacaaggtgctcagtgggggagcttctgagccagaaggaatttcacaaggtaatgtcatcagttaaggcaggaaccgaccattttcacttcttttgtgattcttcagtagcttcgtgccatctggatgtatatgtgcaggcttgggctcagagtcctgacattcttgtcttcttatattaataagaaaaacaaacagtggtgaagtgttggggtggggaaaattttggggggtggtatggagagataatgggtgatgtttctcagggctgcttcgagcaggattaggggtggcatgggaacctagagtgggagagattaagaggaaggaagattttgtggtaaggggtgatattctggggttgttagaaggagcatttgtcatataggatgattggtgatggcctggatatggttttgtatgaactgagaaactaaacagaagacataaggtccgaataagaaaaggagaaaaacaagtattaaaggactaagaattgggaggacccaggacttcaaattagagagtgcctaagggggttcagcatgattatttgcttggctggtgagtttttggcctctatccttgaatttttttatgttgtcatataccaggccagactgatttaggtaaaaacaacagtcttcatttaaaaatatacagagtcttcctttttcagcagtgagtaagtcaaggcctattcctgtcttcttatattaataataagaaaaaataaaataatagtgaagtgttggtgtcatgaggggaacaggaagctgctcggtcttatttgcaaattgatttttggggtaaggaaaactagtgtacatgttcctgtctcattaacaggtggacacatgcaggtggaggagccacagaggaagaagagaccttgcgtaaggcgaaactggaaatgtaaaatgggtgaaagaagtggagtgtgcttttccagcaaaggccatttatccattccaagagggagttaagagtggcagttaggggataagaccaggaccagctatgatggtttggaggaaaagtataagctggcagtgtagacaagggcagggcatgtatggagaggtgaaaacgaagaataggagtatgactagacagaagagagcagggatgaaaagtttttgggatgcagtctaagtagtgggggtgactgcataaggccctgttgcaaagactctggtaaggaaggatagacctaacaaaatgaagggatgtattaggctcataagggttactactgttcttcagaaatgtgggtgagtttaagggaagtaggggtgagtactcgcgacttccagaaggaagaggagagatcaggctggctgtccaatggacacggctttattctggaacggtgaacccaatggggagggtcctgcaggaggacggcagttagggtattatagatgactaagtagggtccggtccgtcgaggttgtagagtttgaggggtcagattcttaacaagaactgatcgtccagatagggtgtcttcataaggctgggaatctggaataggcaagagaagattagcagcctggcaaatttcctgtctagcctgctggaggactggaagatagtcacctagagggctggtgtctgggacgaggttggggccgagcaagaaagggcatccatataaaagttcaaatgggctgtactctgtagcatctcgaggacaggctctaattctgagaagggaaagtggtaaaagtactatccggtcctttttaaattggaggctgagcttagtgaggtgtgtctttaaaagaccattagtccgttctacctttcctgaagattgaggacgataaggggtatgaagtttccactgaataccaagagcctgagaaactgcttgggtgatttgactaataaaggcccgtccgctattggactgcacagaagtgggaagtccaaaccaaggaattatgtctgacagaagggaagaaatgaccacggtggccttctcagaccctgtgggaaaggcctctacctatctggtgaaagtgtcttcccagaccaagaggtatgttagtttcctgactcggggcatacgagtaaagtcaatttgccagtcctgggcaggggcaaatctccgagcttgatgtgtagggaagggagggggcctcaacaatccctgaggagtagaatagcagatagaacacagagaagcgatttccttgagaatagatttccacgatggaaaggaaatgagaggttctaagaggcgggttagcagcttataacatacatggaagaggttatgaagtgacgacagaatagaatgggcctgtgaggctggaaggagatattttccttggtctaagaaccatttaccttgagtggggagggattgataggtagaaacttcagtgggagagtaagtaggagtgactgatgagaaggagaaaaactggccgtgagggacagaagtaggaatgctagctgcttctttagctaccttatcagcataagcattgccctgagcgacgcgatctgatgccttttgatggcccttgcagtgaatgactccagcttcctttggaagtaaagtggccttgagaagagtttttattaaagaggcattaatgatggaggacccttgtgtagtgaggaaacctctttcagcccatataacagcatggtggtacgggatatggaaggcatatttagagtcagtataaatattgacatgcagtccctttgcaagagtgagggcccaggttaagacaatgagtttggcttgctgagaggtagtggaggggggcagagtggtagcctcagtgatagatgtggaagacactatagcatagcctgcctttgccagtgattggcgattgggcctggaagaactatcatcaataaaccaagcgtggtctgggtggggaacaggaaagaggtaatatggggaaatggggagaatgaatggtttcgttaggatggcaaaaccaggtatctaaaggcaaaagtacctaaccatgcctaggaaggaaaggagttgttttgtagaaggggttggggtttgggagattagctggacatgattagcagggagagcacatgtatttttatgaagaattatgccgagataggtaacggatgaggaagaaatttgggcttgactgaagtaatgggggctgtccctgaagccttgcgccagtacagcccaggtaagttgctgaggctgatgggtgtcagggtcagtctaagtgaaagcgaagagaggctgggatgaaaggtgcaaaggaatagtaaagaaagcatgtttgagatccagaacagaatgggttatggaggggtaaaatgggggaattgtaaggagagtttataggctttataaggccatgctgtaacaagtgagtgataacaggctttaattcttttaaagcgtgctgtgggatgggatattggtgttgagcagggtaagggtgattaggttttaatgggatggtaaggggtgcatgatcagttgccaaggagggagtagagatgtctcatacttgtggattaaggtgaggagatacaaggaaaatatgtgaaggaggctttgaactgggaaaaagggtgacaatgaggtgtggctgtagcctaggaatagtcagggaagcagataatttagttaaaatgcctcgacctaataagggaactgggcaggcgggaataactaaaaaggagcgcataaaagaatactgtcccagttggcaccagaattggggagttttaagaggtttagaagcctggccgtcaatacccacaactgttatggaggcaagggaaagaggcccttgaaaagaaggtaatgtgcagtggatagcctccgtattaagaaggggatggactcatcctccactgtaagagttacctaaagcatctatcatggtccaggaggcttccaaggcgatcgggcagtgtcagtcttcagccactaagccgagaagatctgggaaggagtcagtcagtgagccttgcgccagagttccaggaactctaggaatggctgccaggtgagttggacagtccaatttccagtggggtcctgcacagatgggacattgcttaggaggaatccgggctgcagacattccttggcccagtggccacattttcagtacttgaagcaagatcctggggtaggaggtcttggaagaacgcctggccactgcggtttaggcgttttgaaattcttgtatgctggagatgtggctgaagtttctctcacagcagaggcaagtaattgccactcttctctattattgtacaccttgaaggcaaggttaagtcctgttgtggggtttgagggctggaatccaatttttggagctttttctaacgtcaggagtgggttgggtaataaaatgcatactgagaataagacggccttctggcctctctgggtctagggcggtaaggcgtttaagggttgttgccaaacgggccatgaactgggctggggttttatatttgatgaaaaagagcctaactgttttgggagaggtcggataaagaaaacaggagcaacaaccttgactatgcctttagctccagccacctctttaagaggaaattgttgggcaggtggggtagggctagtcaaggaacaaaaccataagccggactaggtgtgaggaggggaagtgatagaaggattatagagtgggggaacagaggctgcggaagaattgggacctggctcagcccggcgagcaggggagaggtcagatggctccacagaaaaggaggattcaaagtactcagagcttggggtggagaccgaaggaacacacaggagagaaagaagaaagatttgggatgagtcgcattgggagcagagactagggcgggactgatgtgtagaagaatgcctggatgtcaggaacctcagaccatttgcccattttacgacaagaattatctagatcttgtagggtggagaaattgaaagtgccattttctggctatttggaaccactgtcaagtttgtattggggtcaggtggtattgcagaagaaaataaggtgtttaggttttaggtcaggcgagagttgaagaggttttaagttcttgagaacacaggctaagggagaagaaggaggaatggagggtggaaggttgcccatagtgaaggaggcaagcccagagaaaagagagggcagagacacagggggggtcggtacttgacaccaaggtgaaggatcaaggcaggtgtccctgtggtgatcagacacctctgaaatgtgggtgaataatcaggcaggcatccctgcagtgattaaacaccaagggaagactgtcttctcgagtccgtgaccagtgccggagttttgggttcacggataaaacacatctcctctgtctctatcagaaaaggaaaggaactgaaattaagggaagggatagattgaagggtggtgccaaaattgaaaggagaaagaggttgagagatagtgagagaggttggagaagagagtaaaaagaagctgcttacccaatttaaaattggtgagatgttcctggagctggttggtctgaggacccgaggttgtaggtggatctttctcacagagcaaagagcaggaggacaggtgactgtcttatcagttaaggcaggaaccggccattttcacttcttttgtgattcttcagttgcttcagcattttcacttcttttgtgattcttcagttgcttcaggccatctggatgtatatgtgcaggcttgggctcagaggcctgacatgcgtgtgttttgtgtttttctggataggcatgcattcctatggaggaggtaagcagggggaagggagctcacattcatcagacacctagtatgtgtaggaaccttctgcatccctggaaggatggatgaccccacatgtgaaacctctcgtgtggttctttttggaattaactaccattgctgaaaagggcctacataaaatatcaaattttaacatgctggaatttttctttattttttttctccttcaaacatttgtagctctttatatgtggtatttcctctgtgtcagaagggaaagagggtgccctttggggaagttctcttccagactcctagaagagaatctgatttaccttaaatgcacaaacaaggccttgccatgtcactggccaaccgcagacaaactacttcagtcacagaaataatttggacacttttgctttttaaggaaaagatgatttccctggatttttttcctgtgaggacgaggcattccaaaaccccagcggggtcaggcacagttcgccaactttatgttttggggggcagcgcatttgcttcccgaagtgagttgcgaaaccgttttctagcgcgcacggggctttcatctcttccgtgcatgcgaacggctttccgagatgccccctttatgggcttggccatcgctacttttgttacaaattaacgtctgggactcggactgctgccaataggaaactcccgcgattcgctgcctagttcgccgccctcacaagactggactctgcacaggccatccatgcccgctggtgcacctcgctctctcgcacgcttaacccgcggggacgcccccgacctcccacctcagccctcgccacagttagtcccgcccttccgcgcagactccgtggagtcctgtcacgctctccgcgcgctgcggcagccgggagattgtgaagggcacctccggcagccaattaacacccgcatactgggcgggaccacgcttgggcaggcggagggggtcgaccgaaggcggggacttttgagtgacaaggatgatggccaaccgtcggaggcccttctactgcgccccgcccctgagccggccgcccagcccccagtggggttcccggcgcggggaatgtcccgggtggagctggctgagtcgcgcgctctgctccacccgacggggctgtgtgtgctgggcctggctcgcggcgaaccgagatggcagagcagtcggacgaggccgtgaagtactacaccctagaggagattcagaagcacaaccacagcaagagcacctggctgatcctgcaccacaaggtgtacgatttgaccaaatttctggaagaggtgagttggggatgagcggcttggggcgcagggagcgtgggccgggtttgggggttcactggcatgacctgtctttcgcggcccggagtccgcatacctacgcctaggcgcgccccccgagttcgctcacctgcgcgtgtacgcctgggcgcgcttccgagtccgcacacctgcgcgtgcaagcctgggcgccccccaccgccccaagtccgcacacctgcgcgctcacacctgggagcgctccccgagtccgcacacctgctagtgtacacctgggcgctctcctcgagtccgcacacctgcgcgtgcacacctgggagcgctccctgagtccgcacacctgcgcgtgtacacctgggagcgctccccgaatccgtacacctgcgcgtgcacacctgggagcgccctgcgcggcggcatcctcgctaggtggtgctggagcagccttccggggatagcgcgcagccatgcgggggatttaaatgatccctttctcccttgagtttgaatagaagggtgtccttccaggaccggcggcattcccgcagtggccggctggagaccacccaccccgagagctgcggatcccgccggaggggaccccaagtgcggaggtcgggtgtggtccgggcctgcgcttcccgcggcagccactggccgaccttgcggtccacacccactcgcgttcgcgttcacctggaagaggctcggtgttaattaaccttttccagtcacgccttggcagccaggtgccgtgcttgactcctgagaccgcggtgtgtggctggagcaagaacacagaggccaggcagagcagcggacgttctgcgtgggactcgcccctaacagctttggaaggtgtaataggaaacgttggttaacttgaagacattcctttgataagattctttgcattcggttataatttttgccgcacacgctaaggggcgcttttggtgattgtcttagatcctctggaagtgttttactacttttgggggagtctcaatcataaatcttaacgcatgctcacgccccctcccaataatgagaaggtttagtgatgggaattttttacatagtcggggagcaggggacaaaaatagatgcctggtctgagctggatcacagtttatatcagaggactttgtttttgcagaaaatgttaaaatcaaaaggcctgttttaaaaaatgaggctgggccaagcacggtggctcacacatgtaatcccagcactttgggaggctgaggcgggtggatcacttgagtctaggagttcgagaccagcttgaccaacatggcgaaaccccatctctaaccaaaataccaaaattagccaggcctggcggggcacgcctgtagtcccagctactcgggaggctgagacaggagaatcccttaaacctgggaggcagaggttgcagtgagccgaaatcgcaccactttgctccagcctgggggacagagtgagactctgtctctaaataaataaataaaattaaataataaggctggagttgatgtttattggtaaggtatttcactctggagcagtgcccgaagataaagtcatgttaccatttagtaaggaggggtttatgttgggaaatcagagctgacctgtcctctccctcctgcccggctgcagatcttgtcatataacatcaattctcattaactctaaatgtggaattttaagatacagtgtgtgctttgtctatttgtgcttatagaagaagtagcataagagaatattaggatattttatattatgaagcattttcttcttttcttgtcttctcctaaagcgagttttttcaaccctggcactgttgacattttgggccagccgatctttgttgtggcgtctgtcctgggcattgtaggatattgagccacctccctgagttctacccactagatgaccggtaccaccacctcccctatttttttttttttttttttttgagacagagttttgctcttgtggcccaggctggagtgcaatggtgtgatctcgactcactgcaacctctgcctcctgggttcaaccaattctcctgcctcagcctcccaagtagctgggattacaggcgcacaccatcacgcccagctaatttttgtatttttaatagagacagggtttcaacatgttggccaagttggtctcgaactgctgatctcaggtgatccacccaccttagcctcccaaagtgctgggattacaggcgtgagccactgctcccagccctacctcccctatttatagcaacccaaaatgtctccagatattgccagaggtcccctagggcacataatctctccaacttgagaattactaaggttactgtgcatgactttaggggtagattttcagagacgataatagggaagtgaagattattgttaaaatgtactcaaaactatttactttcacatttcattcctgtgagtcaggaaaggagggattgtgcaaaaaattttccgagaaaaactgagagatgagagcaagctcttgagtgggtaaattagctgaaaacaaatttctttattttttcttactcaaagtttttgtggagaatgcatctcaaataaaatgaacaagagggtggctgacccctggaacggctaggaggatggcgtgagtgaggaggctggggtctgggagaaacacaaggagttagtttggttttggtcctgttgactttaagaggttggagggatcttcaggcattgcgagaactgcatgcgtttctgcctccactgtctgccaacatgtggttctgggaacaagcaaggccacttagcctttcactggattgtgtctgacctctgggcacctcccgattcgacctcttatggacgtgtttttccatttgccgtctttattatttgctttgactttctgtgaccatctcttgcttattgcatgtcctggtcattggcttcccagcccccggcaaagcctctgggagcctctctctgggttctatctgagactctagccaggattccttgcaggtgacttcctgtgctcctggggttatatctccaataagctcactcgctcagagctcttcagcacactgccctgccaggtagtttgttatgaggctagtctgtttgtctgaaacgtacttttaaaacagaaatgagtgcagaatgtctctgtctctcttccccgcttgcccgatcctctttcctgtcttctattgttgaaaggctccagaatttcatgaagcctttgtgtgttaactaacaaatattttatctcacctaatttacctaaataggaaagatttatcttctccttctaactctcaaatgaactttcagtcattatgggctagacctttgtttactgtgagatcccccatccgtatggacaggatttctcatggctgagtatttccccttctttcagaatgtcctagatttatgtgcatgtccgtgttcatgttgagaaggtgtgtggtgagatggtggagggatcctgctctgctggcaggtacaagccaagaacacaggttgaagctcacaggtgcagcatgtgctccgacctcctgaaataatggccactaaagctgtttttgttgtttaggcggaggggtagaaacctaagagggaagactggcttattattaatggcagtcgacatagcagcaggtgcttagttactgtctgatacttaaaagattttgagctttattgcctacatattttgaactagatttttttttcaatcctgagttctagtttttgagtttatatttgtgaaattgagtctttgcttgatcatagaactttaagggacagttatttgaaatgaaaacttaggcatttaggaccagggggagaaatgtttgcatttccctttctgtgatttgggcagcagcatctattcagtttttaaaagagctgtggaggggagagagaaaggtatcctgtaattaacaacacttccattagctgttgcttttggttcaagtcagtgggtgtttgattcgtgaaatagatactgtcctggaaaattttataaagcagaatgtctttttgtgaagttgtctcctctccctttacatcataaaaatggaaacttgcttctgtagaacattttctagtgttcctgggattctgatagtcttggacctgagccttaaatgttctttacagcattctgcctcatagaagctattggctcctgactcactttgatttttggagtcttaaaagtgtcctttctagcaggttttattgtagggacttgctctttgttattttccattgaacatggctgcctatgttgcgtagaccagtggttctaaggcttgggaatcgaggaagagagtatgggtgctgaaattcattgcccttaattttgaaaaacatagaacacgtatctttacccttgttaaagctaccatatttagggctaaaatactaaatgcctttgctttttgcaagaaaatttgatagtattctgaatctcatgctactaaaggctgcagttggcaaatatgcctttgatgcatgtaaaatgggaacattattattatttaatatataccgttaggtaaataaaacttagaaattacagagtctgtagaagggaaatataaagttattgttggtagtgttggtggcttaggcatcttgggtaaagtggtagtaaaaccacatcttagaaggccacctggggaatgtgaacccgtgaggcttttgtatatttctatatatatctctatattttttggtaacctgttgctacttttgaaaagaggttccaagaggcaactttgttttgaaacagtaaagaaaacagtaaagaaacagcaaattaacttttgctttttgattatcttaaaggttgatgaaaattgtaaataaggaagggaaaacacatgcaagccggctttggtcaatcaaggaataaataacatgcacaattttactgaatgtgaatgtctggtattctgaaaagtcctcctggtgaagatggctgataagtgcctttgtagttgagtggagtctgaacaaccctgtcccgctgggcattcatgggaaagcactgggctggggttaggaaaactagacctggtcttagacatatcatggaggtgaccttgggcaagtcaggtatttctttcagtcactttccttgttctgaagtgggaactattctgtcactgccatctgcattgggagaaatgatatatgtgagaacactggaaaaaatatgtagagaaggcatttaagtgactatattttgattgaattaaaattttaaaataaattgtttttatgtggaaggtccatttagtaggaacatatctcaggaattatagtgttaactagtaaacaaaatgactcaaaatacaaatattcacatgaaatataattgttcaggaatgtgtgctttgcaagattggaaatcatcccatttcaggagcttttaaacatacaactttattgtgtaaggggaaaataatacatgatcatgttaaggaagtggacagtgtggaaaactgcaaagaagaaactcaaagctgcctggagctctgctccccgaaggtggccagcttgagcagtttgcacactcactactacaacaccttgctcgtggatgtgctttacatccatggaaatgtgctctgcatgctgctctgtaatctccctttttccccactaaactaggtgttgagggaccagtcctgaatttcagtaactcctgttcccaggctgcctccttattgtatagagggatcctaatatacggaatcctctttccttccatgtttttaggttcccacctgcaattacctccttatggtagatctttgtaagtgggattcttgggtgaaaggatgtacacttctacttttttttttttttttttttttgagatggggtcttgctgtgttgcccaggccgtggtgtgatctcagctcactgcagccttgacctcctgggctcaaccagtcctccctctggaatagctgggaccacaggcatgagccaccatgcccagctaatttttgtattttttgtagaaatgtagtctcttgttgcccaggctggtctcgaactcctaggctcaagtgatctgccccctttggcctcccagagtgctgggattacaggcatgagccactctaaattttgatggatgttaccagagcaccctggggtggcacaccagtgtgtgcatttctcggttcttaggagtggaggaacttggttgcgcctcattcacctcccttcctgaatttggctgtgtacttctgttaaaaagggaaatgtatggaataattttttatcccctttagcttataaattctcttaaaagtgaagctgtggcaagtaataccttgtctattctatgaaagaatttcattgtctgaaggctcaaagcatcagaaaagtgaccggaggcagcagctgactacatgggaaactgagtagcaggctcagagccatttctggagtctcaagagtgtcctttctagcaggttttgttgtagggacttgctctttgttattttcctttgaacatggctgcctacattgcatagaccagtgctttccaaggcttggggatagaggaacagagtatgggtgttgaaattcattgcccttaattctgaaaaacagaacattttaatcaagtgtgcttcctttcctattacccttggacctagttttcttgggaacatagtcttgagtgtatatagtaactgggtatctgtgccttttactgagttccaacatggggaccgggagggtgagctgaagattgggtggggacagctccgttcttgctgttgaatagaatctggcctgtgctgcctgttggcttagagctgacggctctgtggatgatggcaagaagttactttcttacatccgtagaattctgtctctagcaggcccatgccaaaatgatggcatctgaaccagcactgacgctggggaggctctggagggggcgagggataagggatgtggacctaagggaagggatggggtgattaacagcctctaggctcagttaagggtcctctctgcctggctggtgggcacgggagcctgtctgaaatggaatcacttgaactcttctgtagttgagggcctggggagtgtcagtttgcagcttgtttctttcactgcctgctattgtttgttcttggcagacctattcattaagctttgtgcagctgtgtccagaattagccaggtcacaaaatatatccagacttctttccctcgtcttcctcagaaagtgttaattaagtaaatgccattcattaatcgtccccaagtaaatgctattctttaatcctcccctccccaacaatccctagtgagctaataagaaaagtgatagcagtggacgttggctgaatgtttatggacattcagtatgtgctagggagtgtgccaagtgctttttgcacataaaaccttctttgcgtttgtgcttttaatctctcttttttttttttttttttttggagatggagtttcactgttgttgcccaggctggagtgcaatggtgcaatctcggctcactgcaaccttccacctcccaagttcaagcgattctcttgcctcagcctcccaagtagctgggattacaggcatgcaccaccaggctgactaattttgtattttcattagagatgaggtttcaccatgttggtcaggttggtctcaaacccctgacctcaagtgatccactcgcctcggcctcccaaagtgctaagattacaggtgtgagccactgcgcccggcctgtgcttttaatcttcaaaacaaccctatggggtcagtggtgattgtgtcctcccttttaaaggtaagacggtatgtcttagggagattttgcagcttgctcagcaagtcccacagacgataaggagcaaagccagggcttcagtccaggctgcgggcgctgcgacccagtgtcttcagtgctgagtctgttgctgaggcttgagatccaaggagtattgatgagaacctagcgtagctttaaaagcaaaagtgcatcccactgatacagagttgctgtcatttgctggagaccttgatcactggagagttctctggaggaaccagggagaaagcaaagggaatttgtgatgcaaatatctgaacaaagccaaaacccttggaaagttaatggacaaaaatatgcctttctttccatctgttgtcagtttactatgttgccttctaggaggtgaaggaaacagccattcctgtttcttgtagaggaatttttaaatagagggagtcggggtggagtcttcacggcctcagtttgtttgtgacccagatgctgctctcacctggcaggggctgaatcatcggtgtggttttggttcggaaagagattgtttgcacgtgtagtgggtatgtgtgaggaggcatgtgttgtttggtgaaaggcatcttaaatgactgccctgggaaggattgtttaaatggaaatccgaggaggttcctgctctgataaatccctcagtgggtcccgctcatctctcgccctccccttccgggtccatatcccctctgcatgtgccacgaggttggttgcagggtggttagaatatctttctcctccaagctgagagcagatgccctggtgtggcctctcttgtatctttgccacctctcatggtggccactgggcagtcagttctcaggatttcattggttccatcaaatgggtggtggttttatgagttttcagcttgagtaataaatgctatttatggcattgaaaagtgtgatttctaggagaagcacacaaaaaaaacttgatcttttggaaacagattgtcctttttctgttcagttcctttcaatggcttcctgttgcatttagaataaaattgtatctctttgccctggtttggaaagctctgaatgatctggtccttacctacctcccccacctcagcaaataacactgtgtcctccctgctaatgcccacacctgatcacattgaccctttctctttgtttctcaaacaagccaaacttgtttttaccttgaaacctttgccctggtttcccctgtgtcaggcttggccctgttcaggtctcagcatggtgtcccatcccgttttgtgcctctgctagcagttagaccctcccggctgtgatatgctgctttttccacgcgatgagggctcctgcctgcccgcctgctgtgcacctggcccatgtccggtgccaggaagtcactcttccggggatggaagaggagagcctggtggaggaacagatacgagcccctgctctgtgactatcttatttttttccccctttttccatacacagtgcatactagtgtgatcccttcttactctgtggcccttgtccggtgccagaaagtaacttcccaggatggaagaggagagcctggtggagaaacagacacaagtccctgctctgtgactatcttattttaccccctttttccacacacggcacatgctagtgtgatctcttcttactctgtaggccttggcctgggattttgtccctgaggattgcacagttagaaactagtgggactgtattgtgaaagtctggattgtgacatagtctcagagcatggaacacaagaatggcatcgagggaggctcccaggcagtcagtagaagggaagaggagaattaaaggtgaggggagcactttggtctgcattttccagtctcttcctgcccagagcccgggcctccacctgtgcctgagatcctgttccccttcccactcacagacattccctaagccacccgatgttccccagtataaaccaggcccctccaggccacaccctgctgggttattctcatcagtgttcctgctgttttctcctttcctgcaaaacacacacacacacacacacaccctcctctcctgcaaaaacacacatattcccttctcccctgaaacacacacatacacacacacacacacacacacacagcctcccttgactcttctgccccctccaggatttcctcatttttctgctcccctgaatagtagaagcctctgaaagggttgttaagcctggtctccaatccacctcctccattcccttttaaaccacacctgttcaccacagcttctcttgccaaggtctcccagggtgccttgtgtcagctctcagttctccaacacagtggctcagcagactctgacatagatgctcaccctcctgggttgccatcctctcctggttccctcctccctccacctcctgtctccttttcccacttctcttctgtccgacctccttattggagggcccccctggggcctgggcttttccgctttggcaggctcacacagtagcatggctttaatgtgctaatgaatcctggattgtcacatcctggccagaaagacctctgtcctgaactggctcttgtatccctgaggctacatcacagttagatgtccagtaggcttctcaccctaacgtgggaaacacacctgctccctctgcatgtccccatctcagcagatggcagttccattctcccagctgctcaggccaaaagcctgggggttgtgctcctctcttctcttgctctcatacccacatccagtccaccaggacattctgtgggcctaactttcataatgtcagaatctcaccaattttttaccatgtctactgctgctcccctggttggagcctccatcttctctcgcgtggtcccctcctgcccccgacagcatattctcaccataatagagtgacattttaaagtcagatggggtcagtccgtatactctgtttaaacccttcaagggctgattacactgccccattttaagacttaggatatggctgcagttgtcaggaaagtgtagttctggcagagggacacatacgtatgtccatgtagcagaatagagaggccagagatagactcgcacaaagatttccacctcattgttgacagagatggaaaagcaagtcgatagaggaaggatagccttttcagcacataattctggaacaactggacatcaataaccaaaaacataaaccttgactgaaacctcacaccttatgccaattaactcagaatggatcatagatctaaatataaaatgtaaaactttttttttttttttttgagacagggtcttactctgtcactcaggctggagtgcaatggcatgatcacggttcactgcagcctccaccacctggactcaggtgattctccaacctcagcctcccaagtagcgaggactacaggtgtgcaccaccatgcctggctaatttccctttttttttttttttgtagagacagggttttgccgtgttgcccagctgccagctggtctcaaacttctgaggctcaagtggtctacctgccttggcctcccaaagtgccaggattacaggcatgagccactgcacctggccgacatgtgaaactttttaaggtgacttaggattaggcaaagaattcttagatgtagtagaaatgtgatccattttcaattctttgcactggaaggttattccccccaaataacatatggttccctgcctcacctcctttgagtactcactcactatcacctcaacactatcacctgaccaccgtatttaagcctggatattaccccagccccctgcactgctgagcccagttatgctgctgagtttttccctgtagcatgtattaccttgtaacatacggtataatgtactcatttattagtttttgcttctctgtgtccttccactagaaatgtatgctctgtgaatgcaggactttttctcttttattcactgataaatccagtttttagaacaatgctggcacatagaaaggactaaatagttatttattgattgaataagaattaaaagtttataaatataaaatactagaaagctgatgtggaatggctgctgggtgacattgaataattttctgataccttattttatttctcctttgtctcacctgcatatttcaacccagtttattatgattaaacatgaaagagaggcctagttatttggcattgagaggaaaaaaaacaaaagagagagatgggcacatgccactgtcaatcctgctttctttccacctctgggctgagcgtaggctattctattatctcttttgttttttatttatttttatttattatttatttatttttgagacggagtctcactctgtcgcccaggctggagtgcagtggcacgatctcaactcactgcaacttctgcctcccgggttcaagcagttctccctgcctcagcttcctgagtagctgggattacaggtggctgacaccatgcctggctaatttttgtattttttagtagagacagagttttgccttgttggccaggctgatctcaaactcctgacctcaggtgatccgcctgccttggcctcccagagtgctggggttataggcgtgagccaccgcgcccggccttgtctcatcttttggccattccagcttaagatagatcgtagttagagtaacagcctctcttaggtcatcactcatctaccactgggcccccagttttggtggcttgcatattcctctgaggacatcgggttgcattgggttacaaagcaggaggtaagctgtggcagctctgggcctggcaggactggtgccacagtgccctcctgctcttgtccctcagaagcaggcctgtccctggtccttccctgtaccccaaggtcatcatgtcagaattggtggcttatgtactcttcagagattagaggaagaattagcacacctgctttattttatccaatgagacaagtgtagtaatggtagaagttgaaatactggtcagggcatagtgaccaaaatttggttaccagtacgttttagaccaaacatttactaattcagttctaaaagtaattaagaagaattttgtttctctttttcaagaagaggaaattctaacagcattctgcaggatgattgccagctcacaggctgtgcataagacctgtctgcccttggcctaactaacctttaagaaccatctcatgtagaaatgtctattatttttatcataggatgtttctgtgaatgtgtgccatttggttctgtgattcaggagaatccagccagttgattaaatccagagataacttttgaagatgaaggagaggtggtgagaagggggtcccttgggtttggtgctggaattggccttcagcaatttacaaaggccaggaactgtgccagggactatacatagtctctgtggcaatataaaatggggatgaggaagaaggaaaagtgaactgatctttctcgaacatctcttacttgccacggagtctgctaattaattcacttaatcctgcagatgggtagctgccagatagactgtgcctgagggactcaggaatcatctggacttagacccctgttagcagatctcagcgaagtggctctcctctcagtacacacagtggtcaggagacttggcgtggagtcaggcggcctgcgttcattccccagggcctcccctaactggctccgtcacctctgtctgtaaagtggggatagtaatggtaatgcctgcctcttgggcttatgagctttagaagggtccacacaagtgctcagaatacttccctatacacagtgagcatttattagatgttacccactgatattcatcattatttgtccctagactttttccctggctgctagagtggaaaggagagaaattgaaggcatttgttcaggctgtgaaatgcagagatcttcggcagaaactccaggtgctctcttccagtctgggctttctgggttaatttctcactggagacccaagccctcacctgagccatataaagttacccctgtatcctccatgacaccgttgtgttctgcctcagggcctctatgtgtctgtgtcccgggcttgggatgcctccccttgctcacctggcgagctcctgctgaaatgttcacacagagtctaagcgttgcctcctgagtgacccctcctgggccttttctctgcctcacactcctgggagagttaatccctccatcttttgtgccatgactcctgcacctgatgctcgccacatttagctatctgtttacatgtcagtttccttactagactctaacttcttgagggtggggccatgactttgccattttggtagcaacagagcatggcttggcattcatcagatgtttgaatgagtttgtgggtcccataggcaagctgggtgactgccagaggggcctctttagtttcatgccatgaccttctaggtgaaatgggaagtaattccatcaaggcttatggggatacagtgagagggtggatatgaagccccgagttggtgccccatgcagatgctggcccctccacagagtccagaatggagcaggacagaagtctgatgaactcaaaccaactttgaggccatcaccctttcccgtcttagaaaaacagcatccagaaatgataggaaatgtttggtcagggcatcttgttatcttattctaaatcttgcatcaattgttcattctccaaactcttttgaattgttttcattttgggcttaactattgcagataagctctttaaattaaaggttgtttttgcctacttgttgtttatggacaatctctgtactccaccttttttggtatgttaagcatttggaatgaaagatcctgtttaaaactccagaatggatggacttcagtcacttagcattgcatttaggtgaaaagggttttttgttatggttgtctttctcgaacttctcttacttgccaaggagtctactaattaattatatgacttaatcctgcagatgggtagctgccaaacagactgtgcctgagggacacgggaatcatctcgacttagacgcctgttaaagtggctctcctcttagtacatacagtggttaggagacctggtgtggagtcaggcggcctgcgttcattcccctgggttcggttcatttttgcttggttaagcaaaccctccgaaggcatgactttgacctgctgcagattgtcatattgtagtgtcgttttgcatacgcttttgactgtttaatagtgacaaccttgtagtcaagtggaaccctgacagaagggtgtgtgtgtgtgtgtgtgtgtgtgtgtgtgtgtgctgaatcttttgtacttcgtaagacccagaaaggcagggcagatgacaaaatttcttgaggtttagaagtctgtgaagttttctcccaaattctcaaaagggaaatttatgaagaaactttatttttaagacatctttttatatttaaagatactttgttcagaaatgtaaaaatggtcactttatttgcatgttcagaaaaaaaggtggggggaactgaactctcaaagtcagaaagcagggttcccgtcccacctccctcgtgagctatcagtgtggcactgggcttcattcctctgcgtcccattttctctgtctgaaaatttaggatgttgagtctctgaaggtcctttgcacctctaagcctctgggatttttcaccttcaccctaccgtttggagtcaagatctccaggtcagttgcctggttttgatgccaggctcacagaggaggtggaggatagtgggctgtgcaggaagctgagggagttaagtattaaggctggagcttgtgttgggtcgagggggagaaatggggttggagacgcctctgggctgggtcagatcccggtgccgcgctggtgttggggtatctggtctgcgcaccgccgggtcctccctggccaccctactgtgtggcgacggctcctccagcatgttcttcaagcctctccttttcagcttcttcatctttatttatctgctctattgatccacatcctaactattctaaaggggctgaggttattttttaatagctcccgcttttccagactctgctgtgttcaggcaacaattcggatgccccttcatgttcctcttgttgcttgctgcatgtcaaaccctgattggtaggaagcttctcgaggctcggactgtgtattcgtgagtttcagatgcttctgcatgtttacacaggtcacttttcttgactaaatgattgatgtagtaattaggattaggctcaggagatcctctaataactggcttaagcgggacaggagtttatttgccctaaagaagtgatctttgccaccagagctgtgtgataactgcatcccgctcccttctcggcctgtcctggggacagcctcatcctggtgctcggaggcggtatctcaactccaggcagcaggatgaaggaagacagggcacagaggatccaccactccagaaggaagacttctggaagattcttccattccatgagccagagtttaaccacatgagatatgtagctgcaaggaggctgggaagtatctgtaacatctttctttgttggccattcccagctcagagttttaagtattagggaggaaaggagaaacagacattggagcaatgaacaattccacccccgtccccctcacctgatttgttcagcgaagggtacctcctgtgctgcacaggtgttgacgctctcttcgagaagttccagaggcatttgatttagctgcagaaattctccaccgtaggtttttgaggagggtacaagaaatggtcaaaacagtacttgaggatgagatcccagcagcaatatatgcaagggacaaaagtggggtaaggattggagtgaggaagaccagctggcggctgcagccagaggccctccctggtttcctttacaggaacggaagcctctgctgtcaattgagccagactattaacctttgactttgagattttataacttgtttctgcaaggccactaaaatgtagcaaatttaggagttaagggcaacgttagacaaaaatattattctgtatcaagcttaagacaatctcatttgacctagttatttgaagaatatagctggcaaagacaattccaaaaatatagtgtatacccatttttactttctgggtagagtatctaaggaactataaaatggccctagaaacaacaggaatgaagaatgggcctggtaattgttttcacccagtgaccagcttctgaataagtaacagttatagactgcaaatttaaacctagagtgactgattttacccacagcattttctttctccttacgattattgccttcacactaagaatttattatttattgaaatcatctgtatcaagtagcatcaaatttattttatcttgccagtttttatagatccacttttagtgtacactcttaagtagaaaatagaattttcttgcagttttaaaaatcctttatactgtggaatctctaataatacatttatttagcatttctctttggcctcattctaaaaagaagtggaaacatcgctcgttgtgtatattttctcatttttggcctcaacatacaaacccatcccaagatcatgtctttattgattgtacttattttacagctgactgtgacatattcgcactattgtgctattataaatcaccttctgctattttactctgctattcattttttcttgtatgggaaagtggactccttattttcatttcagccacgtgtgcactctctcgctgttacttattactgaagtagggagcatttgggaactggagaatggcgtgcaaatgaagaaggccttctagggattggctgtgccatgtgaacagtcctgggcgtgccatccatggagcatgccaatattgcccagaagttttgggtcagcttcttttttgtgtgaccttggtggaaaccactgagctccatggtattaagtgggccacgtgtcttctcagcgaggttcttacgtaggtatgaaggaaggaagcctgttgtgatccccgggggagctgtgagtgtagagctggctctgaaagccttggcatctctcctgcaggaagaatcccaggagcaggtgaatcccacctgcattgagcattttttcagtttaaagcaaatccttactgctagagtatatttagaaagaggcagggccagggccgtggctaggccagcttcgtaggtgatgagctctgtgttggccatcagccttaagtgtgttgatttttcacagcaggtcactcagcagtgtttatctgaaaatactggcttggtgctattaattaaggatgaaatgaaaagcttgtttctgtgttagcattgtctaaaggactgtaaatagtgcttaattcattatggatatttggtgcccagtgaagaataatttaccaagtttgtaagaacagtattttcttcctttttaaactcttttatttcttaggaaaccagggctgtacctcttagatcattgaatagtgcagaggtgcaggaagtgccgtttattgggatgactggtgttgggcagaggggtgaccttaccctccagtcagtcactcagcacacaggggcttcttcccttgactgtcttcctagcaaagatgacctcgtctttccttgaagatattgataccattcagctaacacttcattttctgccatatttgtgttcctttcatttttgtgtgtacgtatttggtggaccgttgaccttgataaatcctcagctttacaagtacaattacaactgtgtttctcacattacatgaagtgtaactgaaaaggttcagacaacagatttttaatgatagtaaaaacaaggactaaagccataaaacactcttgttttgttttgttttgtttttgcaatggagtctcgcttttgtcgcccaggctggagtgcagtggcgtgatctcagctcactgcaacctctgcctcccgggttcaagcaattctcctgcctcagcctcccaagtagctgaggatacaggcgcccaccactacacctggctaatatttttgtatttttagtagagacgggggtttcaccatgttggccaggctggtcttgaactcctgacctcaggtgatctgcccacctcggcctcccaaagtactgggattacaggcgtgaggcactgtgcccggccgccataaaactcttaatttatattaaattagtgtaaataagagaaactctgcttgcaagtgttctttgccttgtcattatccagacaggaacttcttcactttacctcttgttagaaataccagaattgttagaaatagataattggtaccacgaggaaccgtcagcgtggagacaaaagatctctcagcaaagcaatctttactttctgcagaaagggtgctcaatggcagatggaacaatgacgagagcacacctgaacaaaggaaaagcagacatatttatcccttacacatttgggtcgtccttactgctgtgtcctgcatccattggctggagcaggaccacacactcttaaactgatacccagtttgctaatcgcctaaaactttcctaaataggtaagtgcaaagaagaacaaaaaagttgcttaggaaaggtttaaggaagcaataacaattccaaatgagaaaggggcataggctgtgagctggaacgtgtctgtgagcatgtccaacagttacataggatagggcttagcaaagagttattagcacaaagcaaggaggcttgaagaaagttagtctttaaaataatcttttatttctaacacttatgatttattctttaacaagaaggggagctttaaagaggaaactttttactttctacatctctttatgccttagggttggcaagatggtgaaacaggtcaggcttgatcctaaaacctgccacagagtcataggagactcatttggtccttggccatcttcagcttttatgttggcctctccttgcatgagtcagttgacagtagcgtattatgccagagtagttttgtttgtggcaaactcttgttctggagatagtttgcacacaaggtaactacagttaatgttaatgtattgtgtagttgaagattgctgggaaaatacatcttaagtgatctcaccgcacacacagacacacacacacacacacacacacgataagtacatgaggtgatggatatggtgattagcttgattgaatcatttcacaatgtatatgtgtatcaaagcatcacactggattccttacagataaacaatttttatttcttaagtataccttgattaatctggggaacatttttaaaaattaaaaaagataaggtgagaatcatcaaactgcactgtgggatgagggctggagagtcagagaggtacccgtggtagctatggggctcgttcattcctgccctcagggaaagtcactcaaatccacacttcagtgatatctcagctgctgtgagtttaggacccattgggtcatctgtagacagtcagaactacgaggctgtctcagggaaggccagaagtctcttctgtgctatttctttatccccaaatgaactgtatgcttcttcaagattggatcacattgatttctcatgtacttttttctgtcccacacaatgccttgcacatagtagacagtaaaatattttgatgaactgaatcagacagcagttaagtacaaaatcatgtgatctgaatgggaagaactgttagagctccggaaaagtagagtgctatgaactggaggagttggaatgagagggaaagttcccatcagccactgaactggttatatataatagttacaaaaccaatgtgtaagaatgatctgtgcttatctcatttatttatctaatgaatacttatgggtattgaactaagagttagagaaacagtgatgaacgagacagatccatgaatcttagaaacaaattgatatgaaatgtcgctgtcactaggtgtgctccagggagtcctctaggacctccctcgataccaaaccccgaaggtgctcaagtccctgatgtagaaggatgtagtatttgcatataacctatatgcatcctcctgaatattttaaatctagattacttataatacctaatgtaaatgttagataagcagttatactgtatagtttagaaaatattgacaagaaaagaagcctgctcatgttcagtacagaagcagttttttttcctggatattttccatccatggttggttgaatctatgggtaaggaacccatggatatgagagctgacaataattgtaggtagtgacaagtactgagagggaaatacagcagtaaaggataaaggcaatagtgtggggacacaggcagcctgctttcattaattatttaacttaatgaatgatggggtcttgctctgttgcctaggctggagtgcactgatgcagtcatagctcactgcgacattgaacttcttgcctcaagcaatccgcccacattggtctcccaaagtgttgggattacaggcgtcagccaccacacccaggcaggctgctttagatggggaaatcaggggagggctctgaggtgttaacgtttgagcagagcataagtgaggtgatggatgaaatcttgtaaaggtctgggacaccagcatcccaagcagaaggcagatgttgggttctgagatggggaccgagtgtggccagcttgagggcctgccagaggctgtgcggccatgaccatgagcaagggccttgtaggacatggcaaatactggatgtttgttaacagcagtgggaacgtgttactgttagaatatcactgaaggcatctgtttcatctctgaaactcccctactttatcttctacctctgcatcaccattactgccacccctctagactacgcaagcatgatcctttcccagggtaccataatcagcttctaaaagtcttcatggcatggcgatctcaggggaactgatgctagggaggatgggagaccagctcagtgacaattgctgttgtccctgggtggtagcaggggaagtggtgagaggtggttagattctcagtctgttttgaaggttgccaactggattggctgatggaatagatgaagaaagaaagaggaataaaacttgactcctaggcttttggctgcagcaactgggtgtgtggtggcagcatttcccatgaatgaaagactggaaggagtgtattttgggggggaaagtgagacatgccatttggtcctgttacgctggagtgtgcattagctatggagtggaagtactgagtagctgctgtgtgtgggagggacctggggctcttccactgctttccttggctgacagatgattctctaagtggggagacttgataagatcatcaggagagccaacgcagatggaggaggggtgaggaccagggactgagccccagggtgctcctgtgtttagacacgtagacgatcaggagactgtggtggccgagaaggttggatgaacacaagcgcagcctgttcccctggaagtcaaataaagaaggcaattcaaggagaagagaaccactgtgcaaaattctgctgcgaacttttatgtgtgagctgtataaagccatggagcgacaggagctgggagccgacattactgtttacaatgcaggggtgtactgtgtcttcctgaaagtcacttagtattgggtaggggtgtggcagttaatgtcttctgaatttagactgtgccgaccttcaatcttttaaagcatatttcctgtttattttcccatagctaacctttatagatgcaaaaagcaaaagccatttccagttattgtattggtattccctgggttgtatctggggattctcatatgctgtcgagaacaaggtatatttgggtaacttacaaagtggagatttcgcaaaagcctgtgggaggcattaggagctacaagatatgtgggcacgatgagtgagttccagtaagtggtttagccctaaacctggtctctctgcctgacacctgttctcagcatttggccccatcttccattcagttgtgcaaaccaaacattggctccagtggcacttcctgtctctcccaccatccttaccgtccggaagccctctcgtccactctgcctcacaccatgcacacccttgcacctgcagctgcccccaccctaccctctggagtggctgcagagaacagccttccctcaccctctcttgcccttttgtctgctgtccactctgaagcctgggttatattttaaaattaaatctgatcgcgttacctcccccacttagatccttaccatggcctctctcattgctcacaggacaaagatcagaatccttggagaggcgcaaaagcagcacacggcctggccctttctcctaccctggggccctgtgaggccttctctcccaggtcctgaattcgctgttccccgcccctgcaacaccttccccagacacctcttggcccttgttgactgcagctcccaccttgtggtacagctcagcagggcccgtcctgacccctttgtgtgggtgacattcctgtgtcatattcttcatggcactaaactctttcacctgaggacatttcctttcacttgcagtggcatggtcatagttattcatgtttcatctctccggctgtgaactccccgaggcgggagccgtcgctatcttggctccgactgtggctgccacgtggagacgttcatgtgtgtttgttgggtgaattaactcaagtgcataataacaaaaacaaatggaaatcttcctctggaaagacggaagaccgttagggtcagctcacgtggaaacagctttgcatctccatgcccatccccacttctgggtcctccttactgacccgcgacatcctctccccacctttctccctctctctgggcactacagctggtcacttcccacacatggtcgcatgagtagaggcttagcaaggagtgcgttatggaggacagatttctgctactgacttcgccgaagtggatccacagcttccatttggctcaggctctttgggagaatttcacttcttttgttacctctaatcttacctatgtgtaaccacacattttggtctttttcttaaatcttttagataatcatcagataagtttacttacctgttattctactactttctgccttgccttttcttcaggccacccccaagtgctataacctgcccaaaggttaggacataacaccgctgccacacgtttatctctgggcataaccacgatggcataaacaccagcattcccaatttttctttgtctcttcggaatgctgacaggcaaagaagagcattttctttagtctccaaatgtgtggctcacgcctgtaatcccaacactttgtgaggccgaggcaggtggattacctgaggtcaggagttcaagaccagcctgaccaatctggtgaaatcccgtctctactaaaaatacaaaaattagccgggtgtggtggcaggagcctgtagtcccagctactccagaggctgagacaggagaattgcttgaacctgggaggcggaggttgcagtgagctgaaattgcgtcactgcactccagcctgggtgacacagcgagactccgtctcaaaaaaaaaaaaagtgatgtgtgcttattaaaattgctgcatgtatttactaacaagagtgagaagattgacaagtttcaaaacatgatttagattcagtttacttggccaagtgtctctctctctctctccgtaatacatatatttcaaggaaaatattagatattacaaaaagccaccctcatcttttactgtcttatcaagatgagttattttttccaaaatatcaatttttaggatttgattttcctaccaattattaagatagacctttaggatggagtgaaaatattttagtatcagttagtttattctaagctatgttttttttttttttagttttttaaatctttaaaattttacatgagttatcagtgaaaccaatataatccaagatgtttctctctctctcttttttttttttgttagaaaattgccccacaaatggtttaggcaaggtaaaaaccagaggtcgataggtagattcatacatacctatcccttgttgctgttcttggtcaaaaattaaggtgaggagttgccctgttgtacttctgtttcagattaagactgtggaattaccccatgaaattgaatgtgtattttctccattttagcactgtaaagatcagaattctgtatctaaaaacttgtctaagtctgcaattctttataaagggccaagtccatgtttttaacctcactcgaagtcgtcctttgaacatcggctgtccctggcaaataatgattgactctgggcgatttgtctccactgacatatccttaacaggaatcaaaagttacggcagctcctgagttcagcggtccctacgcgagtaacagcagtctgtgagtttacatagttgtgggtcctggctgagtcattttatatctcaccatgtggcttctctctactcagtaggtgagtggaagtgtccaaccttaagcagacttttctggaatcaacaaaaccatgtttttattgctgcagccttggcgaggaatccagaagtttcgggttggctttgaggtagccattctgttgtctgcacatctaacgtgcattcccatgcctgtttaaggtggacttttaataatctaaatggccccagtagaagacatttcagtaaattggggaatgcctatacaatgtaacagcatgtagccatgtcaaagtcccgttgaggaagaatacttagtgactgacatggtttgcacctgttccctccaaacctcatgttgaaatgtggcctccagggttggaggtgggcctagcaggaatgtttaggtcatgggggcagatcccttatgaatggctttgtgtcgtcctcacagtagtgagtgacttctcactttgttagttcaggcagagttggttgtttaaagagcctgggaccacctcctctctcgccatgagatgtgtgggctcccccgggccttccactgtgcgtaaaagcttcccgaggcctcaccagaggccgagcagatgatggtgccgtgcttgtacaggctgcagaactgagagccaaagtaacccctgttttctttgtaaatgatccagtctcaggtatttcttcatagcagtacaaaacagactaacatagagacactggaaagtgtttaataaaaatgctgggtaatagttactgagcataaacgatgtgccagacacatatgttcatagatttcatcctcaaaaactacatgcgtgttttcccaagttcacagagtgagtggtaaccactaggcacctctgcctctgtaccatgtatcacctcctttttattttctaaaacaatgcataggataaccatcacagtttctatccaacattacatacacatacgtgtgtgtgtatgtctggctctctggaggcaagatgatgggtgattttaatttttttctttgtgcttcccagtttttctgcagcatagatggataaatgttataaaaagaaaaaaaaagagtggatgtccttagcactaggtatgtttagaccaagtaggaagagaaacagtttcaaatcagaataatgatccaccttcctacaatgtgatgtgccctgatgtcttcattactgggagaaattaaggactgaccacagtcgactctgcaagggagaccggtttttgtgcagttgttggacacttgcaggtgacttgctcaaggtcaggatgaatctaaaataacattcaagctcagttaaagaagtttttttttttcctacaaaagtacgtatttaggatgctttgcccaagctccgctttcttttttattactctgagagctgcttcccttgcctgagaatccccagacctccttacctctgtcctgtgactaatccccacttgtcaatcatcttggagaaaaaatttccctccctgcatcatgaccatccttgtttcacatattaaagcagctgaaagcactaaaactcttttattccacaagaggctcttcccgcctctccccagtgtggagttgaacccctgcctccgtgcctccattgtgtcctggcagcactgtgtcctggtggcagcatcttcagcaagttacttgttttgttttgtttttacctaccagaaagtgagttctgcaaaggcagggactcatctatctgacagtctgtgctgcccgtgcattgccggcacgcagggtgctttccagagggaagtgacacacgtgcctcttgtgaatcgtcatcttaggcatgccagctcttgaggccacacttagactaagatgtcagagaagtcagtctcaggtgcaggagtcaagaaaaaatagattgggtagagaataagagcaattttgagagcctgatggaaaaaccaagcagacattaccaaaggatgaaggacacgagcctcatgcttttactaagctgtatgagtgacatggggaagcaacttatgttattagtgaaaggttctttctctctctctttttttttttttgagacagagtctcactttgttgcctaggctggagtgcagtggcgcaatctcagctcactgcaacctcggcctcctgcattcaagcgattctcaagactcagcctcctgaatagctgggactacaggtgcccgccaccacggctggctaatttttgtattttttgtagagacggggtttcgccatgtaggccagtttggtctcgaactcctaaactcaagtgatctgcctaggattacaggcgtgagctacggtgcccggccgggaaaggttgtttttaaatttttttttacttttatctttttgagggtctccccctgttacccaggctggagtgcagtggtgcagtcactgctcactgaagcctcagccccttgagcttgtgccatcctcccacctcagcctctcatgtagctgggactgcaggggcatgccaccgtgcccagctaattttttaaaattgtattttatagttatggggtctcacaatgttgcccaggttggctttgaacttgggcccaagtgattctgctgcctaggcctattgtacttgcatgatggaaatggaatataaaggcctgtgttgttttaatccacatttatggacaagttagtctcctgttgtcatctgtgtcttctgaaggagtcacctgtttggttaaataaattctggccgttttctcttaattcatttgcctgaaaaaaaaatttttattctacctctcctttgaacagcatcctggtggggaagaagttttaagggaacaagctggaggtgacgctactgagaactttgaggatgtcgggcactctacagatgccagggaaatgtccaaaacattcatcattggggagctccatccagtaagtacattttgggggccctttcttatttgtatttaaggctatcagatgaccttaccctagtctgtaagcttgcatgtatacacattttaaaaggagtaaagcaaaaacaactcctgattttaggacaccattttttgttataaataaattgaccaaaaatgtctttgcatttcactgttgcttttttttttttttttttgagacaggtcttactctgtcacccaggctggagtgcagtggcacgatcatggctccctgcagcctcaacctcctgggctcaagccatcctcctgcctcagcctcttggtagctgggactacaggcacacacctccacgcctgataaatttcatagtttttgtagagacggggtttcaccgtgttgcccaggctggtctcaaactcctggactcaagcgatccacccacctcggcctctcaaagtgttgggattacaggcgtgagcccccacacctggcctggttgcattgtttactggcacttcgttttagtcagcaggctccaccccacagccatgcactggggagtctgctcagtcctagaaattccatggggcagcacgttttacaaggtggggagaatcaacccagcattgctttctttccttttctgaccaaaatatttttattaagaaccccacttctactttcattaggccaaggatattttagttctaaaaaatgatttaaaaaatataaaaacggagctatgtgaaatgaataagctctgccttctgtagaactagcacattgtccatattctactcactgtaccccagaccttcgagaatatcagctctggaccaattcattgaccaacttttggaaaacactggcctaatttggcttttcttttctttttttttttttttgagacagagtcttgctctgttgcccaggctggagtgcagtggcgcgatctcggcccactgcaacctccacctcctgggttcaagcaattctcctgccttagcctcccaagtatctgggattacaggcacaggccaccatgcctggccaattgttttgtatttttagtagagatggggtttcgccatgttggccaggttggccttgtactcctgacctcaggtaatccacctacctaggcctcccagagtgctaggattacaggtgtgagtcaccgcacctagtcctaatttggcttttctataaacactgtgctgtgttacggttttagacccctctgtggcagttgtaaatgaccatgttaaatgttactagtctgtcaacctaagttatcaggaaaatcgctgaaaacttggaaagaagttgccgagcgctctgagcttctggagtggatcctggggccgcacactcagctgccctgtccacctctgggagtgcctggctccgtcctgccttcccacttgtggtgcatggttagcagcccgccagaaggggacaaagacctgctaggagcccgctctgctctcgtaagaaaaaaatggagaggcaaatagcctcattctaagtgagcaaactgagaaactcttaaagaatataggaaaagtcttatcgtataccactgatgatccctgtaatgactgtgaatgaagaagaggttacattaggttctttgtagaaggctcgaaagtaggaaatccatttgagaacaacttcattgagttgggaggtttgtttgattttgtttttggtggtaggagatatgtactttgagggagtaagcttcattcatctgacaagtttatttgccccgatattttcatcccatacttcacaaaggcaaagtgtcttagggtcatcagggaggcctgccgttacacatgcctgatcccatccttgtttccagctgtgggtcaggtttcaggccctgactgtggcacttctgcttcacctgcccactgggcttccccctggccagcctttaaacacactgtatttttgacagcttcagcctgaagttgaaatagtttatgactctaaaactgggagactgcagggcttaactgaagatatcatacacgtaagagatacatgcacaatctcaaatggaatttgagaggacagaagggaagaatcagtcttcagctcctccctgaattacgtgtcgcaatctgagtctaataaatgtgtgtgcacatcagcatgtacagagagctgtcatgggtgctgttcgaaactttggaactctagatagaaaatatctcttggcacttaatctgctactaatttttgctgttaaatcagatggatcaaactttgtgtttaatagctaaatgttgaatctgaaatggtaattactgaattataattttaaaaagtctcaaagtcagcattttggaagtggtactttcatagatttttaaattccataatgtgccttatcttttcattgcaggatgacagaccaaagttaaacaagcctccggtaagtgtgaccatctcaagtatctctggatgttctcgttgtatttaatacttgtcaaactgaaggcagagggtttttatttacctgactgatgccagcacaggtctttctagataaatgaatatgtaacctactggctcagcaagtattttttatttacggaaacctgtcagtatgatttgttaggatggcgtgtgtgtaatttttttaaggctgtcagtaaactacttttttcatcataattatcaatatataccatttgaagagctactttttatggtagcacgtgcttctgatctaaaagatttgacacaagccttattttcagagaacttaaaatctgaatggatagtggttttattacttaaatctttaagggtgtgtctcatgtcttcttcatctttaagtctcttgggcatagtaggtgttcaataaatacttgtcagatgaatttaatgaaattaaataatacccttttgacttacttttccttgggaaaggaaaataactctggcaatactagttttatgttctgattcactagcctttctctctgaactgaccatctcacttatatttgaagataaatgtagggtgagaatggaagagcacagcctaagttcctgaaaagtacaagtaggcaaaatagtttctagtgtctaattaaaggactacaggggaaagttttgcttaaatcaaatgacaaaaaagaaagtataatttttcgttttggtgtaaattcttggtttcattagagaaagtgcaacagcaagaccccactgagcttgtgtcgagaactggtgagctgattttttgagctgttgctgccaagacatcatctttaatctacaaaaggatcaaagcagttaatccaataatataagcataaaggccacatttacctcaacatccctgatagtacaataaaagtcttgtgtaatactatttagtacaaagcaattttttttatattctctccttattcaagaaagacttaagttcaatgtgaatgatatgagtacttccaggagataaaaagttgacttcagaatttcaatggcctctgtgacaattgcttagaatccttgctgtgagttcatttgactttagcatcttttttgaggctactttttggacagctgaaattctgtgttgcataaagtttttcctttttctctgaagtctcttaagggaagaatatatattttttttatcatgtgttcagcatgttaatcattttggtataagtcatttagctatagcaaaacaaaggtttaagattcattagatgaacttagatgaccgcagggccagccgtctcgctaaccataaagactacaagcagaaaacacttgtaggtgtaagattgtacatgtgtctcctgccataactactttcagtttaaaggacaaagactttcttccttatttgcttttagaacacgtgtattacagcctatactctgttggattaattgcccattactatttattgttcttattttctattttaaagtggcagttactttgatactgagaatattttgggaacagagcaagtttatgtggtaaattctgggactttagcttttagtatcaaagaaagctttcctgacaacattgaggcacagccctttgtgcgttaagacatggcttacttcattccagcattagcagttgatacttgatcagcttgttagatgtagaaggtctcactgaagtttgagaatcacactaactttttaaagtagatttttgtttgtttgtttttgagacggaattttgctcttgtcacccaggctggagtgcaatggcgtgatctcggctcactgcaacatccacctgctgggttcaagcaattctcctgcctcagcctcccgagtagctgggattacaggtgcctgccaccatgcccagctaatttttgtatttttagtagagatggggtttcaccattgttggccaggcttgtcttgaactcctgacctcaggcattcgcctgcttcagcctcccaaaatgccgagattacaggtgtgagccacggcacccagcctaaagtagatgtttttactctcttcagagattttacagattaactaacttctgagtattttttaaacaactcttctttattgtgactttgcttcagtgagagcagaaccggaagaatgtgggacaagaacttgctggcctttttgagaggccataagcagatgaaatgaaaggaaatacatgagcatttttctggatgtatctttcttgtgcttttggtttagtggaagtaaagagtgtccttagggatttcttttgtcatgtgtctgtataaccatcggccgatctccaggttgaagaatgtacactgtggtctaaagttttgagatgttgcctgcttaaaatatctagttgaatagtgaaataaaatgcagtaaagattattagcttgaacctgccctaaggaaagcatagtgttaagttaccaaattaagatatttgtagacttagaaatcatgcattttaatctaacataaatgtttctatcacatttgcttacatagagaatattagtcgtagcaataccccttcttggttatagttttgaaagcattcttgtagaagttatttggtcctcacagtgtctccatgttagacctgccaagggaggtaggtacattgcagctgggaagtgttaagcacccggctcacagacgtgctccagaaccatctagcacccatctcaggctggtcagttgcagtcccttaagcttctcctctaggttctgggcttgccgtgttagacatcactctgtcagtattttaagggagataggcttcccactaaagtttacgttagatgaacttataaatgagatgactctgattcacaaaagcttgttgggctttgcatgcttttcataatttatggagcttactgtaatttacactgattcacatgacttttataagtcattatgcatgacatacttattttacttttttgagacggggtctcactctgttgcccaggctgcaatgcagcggcatggatctggactcactgcaccatccacctcccggggtcaagcaatcctcccacctcagcctcccgagtagctggaccataggcacacagcactgtgcccagctaatttttgtatttttctgtagagacagggtttcaccatgttgcccagactggtctcgaactgctggactcaagcaacccgccaatctcggcctcccaaagtgctgggattacaggcctgagccaccatgcccagactttgacacactgatttaattgttaacctctttttactgaagttgaacctcgaagtcatggagtgaacaggtggcagagccaatcataaaaaccatattctttctccttgttcattgctgacattctttgatagtcacgtccctaaacccaagtgaggccctcagagcactgaccactaaagaccaattacttttccatcaaagtgcaaagtggtaattcaaacttcctttaactgtcaagcatcctgggctacagagccaagaagataatcaacaatcaaaaggtgatacgattatttcaagttcccctctttagagttcatggctgttgctgatgatgctggtgccagagtagtgttttaaccttagcgctctcccatggtaaccacaaaggcagcaggagggcaggtgggaggttccagagttgtcagcacgttggtgaaatgcctgccctcattttaacgacgccgtggatgtttgtgtttgccttccgttggctgtttcaaacttaactttctagtttgacaatcatattttaccttcagtgattcttttgtttcagaactgattgtgtcctctaatagctaactaatatttttgtatattttgattatttctagtaatttttgttaattttattcatatatacacaatttggaaaatcctcttgctgtagttatgaatactttttatagatgctaagattttaaaattgctggaatagataataaatttgcaattttatttttaaatgacttaccttttttcccctactgtgtcaggaaccttaaaggcggtgtttcaaggttggtgggtctcataactgctttgcttgcttttccctgaaaggggtctgtcttttcacgggagtttctctaacgtgctttgcagagtgatgcttgccttactgcaggccgctgattgttttgctaatgctttttatctttgctttgggaaactgcagatctgaagctgtcttatttatggcaacttctgtttgaggccctaatgcttatgttggtgtggaacatcaaaagaatgcttcttaacccattttcaagccccaaaaagttgatatttcactagaccttagcttttcagctgttggagaagtatgcgtttttccagaaccattgtccattcactttagtgctactcaaaagagctgctcccagaaagctctggaggataaaaacagggcttccttatctggggatttgctgttaggctgacagtgaccagctggtgacaagtgtgacgccgggcacagcagtcctgtgaggctggtctggtgtcttgctggttccgtctggtcagaattaaagcagccccccgggaaagttggcctagaatgtagaacttaaaatggcagtcctcttttttctttttggttcacatatatttaatgtaatttaggtacacttttttacatctgtcagatttgaatgaaataactgatgtttttattgaacattgtgttcatgcttttgaagaattaaactgctttttctaaaggtgacgtgggattgtgtgtatgtgaacatgaatgtctgttttcagtttctgcattatttagatgcctagcgtgtgcaagatattttatgtagcatattaattttgaatgtttttaaattattgaggttatgtccttaagtaaatataatgattaaaatgttttactctggaagaaaacaaagttaggcattttagtgaaaagaagtttataattttccctttcgacatcttctgaagaatgcattgcataaaatattgtgttcttattttcaaacaggattttagtcaatgaaataagttcagcattcccttgaacttactttactttttcctctcgtgtttcaggaaactcttatcactactattgattctagttccaggtatgtggtagctttcttttaaagcagtagtgggtgggagggctcatgggtccaggttggacaaggtgcgtcccccaccttctgggttcctgggcctgacactgtgctgtctcagcaaccttctgctgaaggccagactgttcagagcactcagcctcaaactttcaggtagccgactgtgaacactgtccacagccacgtgatctagctggctggctgcatccaccccaaggaacaaacagaacaattgcatttccttttcccccagggcagcatcttaggcggccagtcccacagcacctccctggctcatccaagcagacatttccttcctttcaatccatgtctgtttcttaaactctagtgattacatttccctaaacatgggtcagttttcctttgtcatttttattagctttaaagttgaagctggtaatctatgtgtagcacgactcaattgttctaggcaccagatttgtttatgatagtccaagtgcacattaacatctttggcagctctaccatattgacttcagtagtagccacttttttggacccaagctcaaaaccacacatttgtatttcatcctgtcaaatttaactgcctcagtccgttggtgttctggaatattccctgcctgcaggcagtatttcaccttactcttcattaacaagccagtttctttctaaagtgaaattgaaaaaccccaccaaaccccactaagacaaaagttacacttgtaattcttatgaaagtttcacttgtaatccttatgaaaggattatacttgtagtccctatgaaacacatatgtataccaagtctatttctaaagcctacacattaatttccatttttctaagaaattaagtcaaagatcaaaatctaaagattcaaatctaatttaaagattcaaatagaggccaggcgcggtggctcacgcctgtaatcccagcactttgggaggccgaggcaggtggatcacgaggtcaggagatcgagaccatcctggctaacacagtgaaaccctgtctctactaaaaatacaaaaaaattagccgggcatggtggcgggcgcctgtagttccagctactcgggaggctgaggcaggagaatggtgtgaacccaggaggcggagcttgcagtgagccaagatcgtgccactgcactccagcctgagcaacagagcaagactctgtatcaaaaaaaaaaaaaagattcaaatagaaattatagctcatccctcctttgtccctgatttgatttgtaatctgtaatttatagatcgaaattctatgcatcaggactgtaaatttaggcttttttttttttttttttggtgaatttagacctgtggaccacacaccaagtagtctggccattctgtttcttaaccctttaaatccacttcagcacaggtagtaaagattagattttccaaacctaagcttaaagctgtggtgttaatggcagtgttaatcatcacagggcccatactcttcaactttacagctggtggggcattcattttttggtttgtttatttttgttagtttgtttttgagacagtctcgctctatcacacaggctggagtgcagtggcgtgatctcggctcactgcaacctctgcctcccaggttcaagcgattctcctgccccagcctcccaagtagctgggattacaattagctactgccaccacgcccagctactttttgtattttttggtagaaggtttttactatgttggccaggctggtctcaaacttctgacctcaagtgatccgtctgccttggcctcccaaagtgctgggattacaggcgtgagccactgagcccagccaagtggggcatgagttttctcataaagccagcagggcagagtgattcctagtatagcagggcatgtgttacactcatgtcacttttagcaaatccacgttgccttttcagcaaaattcattacagagttaagaaaaacatgccctggtaattttctgttagaaggagcaaagattttgagtccaccacagtgcacatcatgtcagcatcattgctttttgtgtctttctagttggtggaccaactgggtgatccctgccatctctgcagtggccgtcgccttgatgtatcgcctatacatggcagaggactgaacacctcctcagaagtcagcgcaggaagagcctgctttggacacgggagaaaagaagccattgctaactacttcaactgacagaaaccttcacttgaaaacaatgattttaatatatctctttctttttcttccgacattagaaacaaaacaaaaagaactgtcctttctgcgctcaaatttttcgagtgtgcctttttattcatctactttattttgatgtttccttaatgtgtaatttacttattataagcatgatcttttaaaaatatatttggcttttaaagtatgcaccgtgtttgcctgtttggtgtataattgtctttaatgtttagaatctggttatttagaggattccttcaatgtgttactcatccagacccacagaggccatatgactggaggtgcgggaaataggtttgagtgtctcctttcacatcgtcacatctcattgagtaaccatgtattgtatgcttccgatatagtttctttttttcaaggaaattaagaaaggccagaaattatagtttaaggatttctaataattgtcctacttgaaatagatcttaaaaagaaagtagcggctgggcatcgtggctcacacctgtaagcccagcactttgggaggctgaggtgggtggatcacttgaggtcaggagttcaagaccagcctgaccaacatggtgaaaccctgtctctactaaaaatacaaaattagcagggcgtagtggcgcatgcctgtaatcccggctacttgggaggctgaggcaggagaattgcttgaacccaggaggcagaggttgtagtgagctgagatcgcgccgttgaactccagctgggcaacaagagtgaaactctgtctcaaaaaaaaaagaaagtagcctacagggcctataagagagacttcttatcttcactgattgaaaaacatcagcaacttaaaaacacatgaaccatgagagggcatcgcaactgtccattctctcagcttacacgtatcattgcaaaggcactcacagcttcataggttctaaagttttaagaattcctcattcagagagtagaattgtttgtaaactcttctaaggaaaggctggttttctaatttgtaaggagattgtgggacattggaatctgatctttgaagaaatttagcggctagtgtcaagctctgaagagttctggtgtggctctgtctcctcctgggggctctaaggggctgattcagtcatcttacttcccatttattattctctgccttatgtgttattcttttaaatgtggaaacttgaaagctgaatttgttagaacccagtacatgtgtcattggctgtgactgcatttgcactggcatgagctgacaaaccacgaggttcttcagaagtgaccgcgtgcagtggaaaggaattgtgttgttcttacagagtacaacctttataatcaaataggatgcaccgcctttgccttctttagtcactgaaagttgacaagtagtttctatttcaaaataaattacaacacttgttaagggacctatgtaaatatttcaatatttttggttgtgatttttagctataaagcttcacattttagtagtttttaaaacattgctcctaaatcaactatgaagtgaatcgaagtgggtcagtcgtaccttagatgacattaaagggttaacttgtaaatcatttttaagatgttgagtaatagcatctgtatatcgttaagaaacataacagttgaactttgacatttttatcagtgactcagcaatttgctgctgtggctggcaatgtttcttcatgtgttttgggaacaacatgtggagtaaaggagagtttacttcctaattttaacatttacagtttgtgcagccagactctcaaggaaagatatttgacacttttttctctattgctttcccttcagagaggtgagagacttcagaggctgccctttcttttcatctgctgcttgtgaaaggaaaacatcttgggcccccagaatcactaaggaaaactcaagctggaaactgcttagggccaacctgcctcccattctactcagtcaagcctctgctcactgagagagaggcatatctgattgcttcctttggaaaggctaatcagaaactcagaagaatgcaaccctttgtgtctcacctctctgtgacctggaagctccctcctgctttgagtcttcctgcctttgcttcaaggtgtcccgcctttccaaacagaaccaatgtacttcttacatatattgatcaatgtctcatgtctccctaaaatgcataaaaccaagctgtgccctgaccaccttgggtacatgtcattaggacctcctgatgctttgtcacgggcatgtcctcaaccttggcaaagtaaactttcttttttttttttttttgtttttgagacagagtctcactctgtcgcccaggctggagtgcagtggtatgatcttggctcactgcaacctccgactcccaggttcaagtgattctcctgccccagcctcctgagtagctgggactacaggcgtatgccaccatgcctagctaatttttttgtatttttagtagagacgggatttcaccatgttagccaggctggtcttgaactcctgacctcaggcaatccacccgcctcaggctcgcaaagtgctggaattacaggcatgagccactgtgccgggcctattccttgactttcttaataaagttgttttcactttgcactgcggacttgccctgaattctttcatgtgcgaggtccaagaaccctctcctggggtctggattgggacccctttcctgtaacacagggactgtattgggtgcacgtgtgtcagttgctcacctcctgggtttgagttgatgattagggctctggttggaacaggcatctcccttcctctggaggtgtctagatgaaggcaagtggaagttctggaagcagattctcctttgcagcgtagcctttctgagaggtgtgcagacacagatggcgtccggatcctcagcttctacctagattgtgggagtttccctaggctgctgtaaccaagtacaccacaactgggtggcttagaacgacagaaatgtgttctcataatttagaggccagacgttgtaaatgaaggtttcagctgggccactcgccctccgacactctgggtggaatccttcctcacctcttccagctgccactggtggccagcagtcctcacctggcggtcctcacctgacagtcctcacctggcggtcctcacctgacagtcctcacctggtggtcctcacttcacagtcctcacctcatagtcctcgcctggtggtcctcgatgtggtcctcacctggcggtccccaccttgtagtcctcacctcgcagtccttggcttccggctgcgtcacccagggctctgcctctattgtcactgacatttttctccctttgtgtctctgtcataaggacacattggattacctaccccagcatgacttcatcttaactaattacatcttcatgatcctgtttccaaatagtcacactgaggtgctggggttaggacttcaacatatgtttttgggggacgtaggtcaacccacagcacattcttttctcaaagtgacctgatgtttatgcctgcgcttcttcctttactctctttcaactcaattcctcttctcccacttttcaggaaagaggcgatcttagctcaggccactgcaacaaaataccttggactgggtggcttaaaaagcaaacatttgcttctcacagttctagaggctggaagtccaagattaaggtgccagcagattcggcgtactcacatggtagggagaggaagcaagctgtctcgggactcttatgatgacacgatactaccccacctcctcatacctgcacattaggggacagggtttccatatgggaatttgggggagacattccatctgtgacagagacctatttctcacccatcctgaattttaatattggatgtgaaagctactgtcaaacatggtacatagtggggtcgtgagtctctgtaatagagacacttctttaatcaaggtaccccaccccaagtcaggctttgtgctttccttgtctggcgtgtgctctgctgacggtgaatcatagagtaggaacggggcgatttagccttctggagggtggttggagttcacatggacagtcagcagcaggggtgatgacattgcattgagcaatatctgttctaccatgctttcactgtctttgatgaaggcctccctccctcaggagtgccctgggagactggtcagatacatgaaatcatcttgtgatatgggtccacagaaaatcaaaatcaaatgtttaatttcactggtatgtgtacatttccattatagacaatgtgattgggaggcaaaagactgtcataatatttttcattaggataaaactggggagaagaaatagacctatgaggtcaaggagaaaaaggaacaatgtacaatttctttctactaagagtgtttctgcatctattacaaaagggtaatggcaaattgcattgatatttaaattccacttagcaaattttaaagagtgatatttcagctttattttaaaatgtcaatatttcaaatgttgcataacgatgccctttgtaaatatttaaactcattatgaaaattttaaagggcaactgaaggtgtttttcaacattcttgtaagggtaatttaagtagaatatgtgaagagcactagctcgtggcaggagcttgttctgactggctgcctctgcccgccaccgcctcacacacctgtccccacatcctttctccatggcctggccacactgtgaaatcacaacataagtttcaagcattgatagtgtatattgagtgaggttatgcactacacacttaattttgacatcagcctgcctgaatgtttttcttgcaaaatatttaaaaaattgctttttatttgttagctcatcagtccaaggcctcagcacatagcctggctcacagaaacattcaaggttttgagttgaaactaaattgtgaattgttttcatattttccgtggcttctaagtctttgatttgattttttaagactctgtactcctaactgtaagttggaatgactaaatctgaaagtattgttttaaaataaaggtaaggcatctttgatactataaagcagggacagaatgaaaaacaccttctctttccggaagacatctgttgtactgaaaatctgaagtcactcttgggcagaaaggaaggcttgggaggcttggagaccgcggttggaaacctggccctcctgcttgctagctgcatcgttttgagtaaattacttatccttgcggaatcttactttcctattgatataattcatgagcaacgcttcccttaggcctcgactagaggtcctgcccactcggaggaccccgtctggtccactggctgtgggcttccccatgggccaaggatgtgcccacctggagcctgtacccctccaaaccctagtacccccacacacagcccaatcctgcctgtaggtctgggtctccccagctcatcctcctgagggtcaccaggctctggggggtgcacatcagggccgaaagagtagccgagggctggtggtcttcagagagttggacaccctggatgagcaggtggggtctgcaggtagggtcttcctgagtgcacttggaccctgcatgtgagtggactggcgctgagaagggaagcggggagctgggagctgactcttccaatgccaccaccatctggcacagaactttgatgaatctgaaaatcctaacttcaaaagtgacctttctggccatttgtcaaggcaggtggatggggtatattttaagacttgtcagtggctgcacaacattaaaacactcggacacacgatgtgtgctcctcctgccccacagatgtaaggggatggtggctcctcagcgggtgaggattgaaatgaccacagagcagccgtccactgctggcccatgtgtctaattcgtgtttgcactttcccatccggacctcttaaagattgctttatgttaagatgaggtgtttggtgtataaaatttgagcaaaacaaagctgattgcagtaattgcagctaataatcacatccatgtatagaaatccctagaaggccaggctggcccagtatataaagctcccctttctctctcctgtgatcactgttgtccactctgtcaccttatctgaaggcaccatttggtttggctccacatcagggtggggagcactggcatttggggtcgtgctgtcaccctggaaggtgagtgtcactccttggtcatcagcattaccaagggcaagggaagaggaatggcagggcccctgctgagagctctgccatctcctgggaggagtggacacagaagccaggagacaatggggagacaatgggaggatggggagatagtgagggggtggggagacaatggggaggtgaggagatagtggggggtggggagatgacaatggggggatggggagatagtgggggctgtggagatgggggtggggagatagtgggggatgatatagtgggggatggggagatagtgggcggatggggagatagcggaggatggggagatagcgggggatggggagataggggatggggagatgggggatggggagataacgggacaatggggagatagtggggggatggggagatagtggggtggtggggagatggggtgtggggagatggggaattgggagatagtgggggatggggagataacagggggacaggcagatagcgggaggatggggagatagcaggaggatggggagatgggggtggggagatagtggggggacaggaagactatgggggacatggagacagtcggggtacagggagagtatggggaggtgggaagacaatgggggcacggattgatgtcaagtctgatgctcagctgcttagcggaggtgtggccggcagaggccagcaggaagaagtgtgctgggcactcagcacctgccagggaagctcagaagcaatcgaaaagggcacgagtttgtccaatagggatggggtgtcaaaggggttctgtgaggagacatattttgtaatcaatcaataatgtctgaatattaagagatcactaaatcattatgtaaatcctgaaacataaatcacagtcttccttgattttttgactgaaatgcgaatattttaatcaagatggaaaacacaacccaagttgttggtgggaaggagacatctgtcaggaaaagtccttaaaaatgaaaaaatagtgaggcttctttctctgctcttctctctagccccagcttctggtcactcctccttcctactgaaggcacagagtccagtaggccatgaagttggacatggaccacagcctccatgaagaccaggagtagaatgtctagcttgagggtgggtgggtggtcccggcatggtctcagttgccatgcagccagctctgcatctggttgtatttggaatctgtaggaccaggctgaagttgaccaagggcttcatgattggcctagaaacaagcatacaaccagagatgggatgccgtgggctccaccatctccactccttttaaagaagaaagaagcaagtgaaacaaatttgctttttgaaaaccttaggtctcccgaaaaaaaaatgcaaaatgttacctttagtccagataatttaagaaaccattaaaatgccatgttgtcatttttagattagaaagtttgacttgttttaatattcttgcagccacgagggaattctggaaataaaggaacactttgaagttgcagtagaaagaatttgaaattcacttgataattttaagtaacatcatatggagaaccttcaccaactttgagaattattgtttcattatcttaatatgctattgctaagctgaatttattttaccattatgattatgcttgtcatgtttataagtcaatagctgtttaaggagagatcatgtgagaattgtcacatggacacatttaacatcagccatgaccatggctcacgcctgtaatcccagcactttgggaggccaaggcaggtggatcacctgaggtcaagagttcaagaccagcctgaccaatatggtgaaaccccgtctttactaaaaatacaaaaattagccgggtgtggtggtgcgtgctggtaatcccagctactcgggaggagaatcgcttgaacctgggaggcagaggttgcagtgagccgagattgggtaactgcactccaatctgggcaacaggtgagatccatctcaaaaaaaagaaaaagaaaaatttaaccttgttataagtaatggtagcattacttcacatttcttttcttagttcgccagttcatgaacatgcacacaaaaatccatatttgtcttggaagaaaacataggcataaatcttaatgactttggattaggaaatggtttcttagataacaaaagcacacacagcaaaagaagaaatagatgaactgaacttcatcataattaaaaacttttgtttcaaaggacaccatcaagtaaccgaaaagatgacacaggatgtgagaaaatacttacaaatcaggtatctgagggacctgtatctagaatatataaagaaccctgacaactcaacaaaagacaactcaagttaaaaatgggcaaaagatctgaatggatagttctccagatgaaagtgcatgaatggccgataagcaggattagcatgctcagtatcattagtcattagggaaatgcaaatcaaaaccacaagatgccatttcacacccatggggaaggttataatcaaaaagtcagacactaccaagttctgacaaaggtggagaaattgtaacccttgtgcattgctggtgagaatgtaaaatggttcaacctctgcggaaaagagtatagcagttcctcaaaaagttaaacagaattactacatgacttaacaattccactgctaggtatataccgaaaagaaggaaaaacatgtgtttagacaaaaacttgttatgtgaatgctcatagcattatttataatagccccaagctggaaacaacccaaaagttcatcagtagatgagtggataaacaagtcgccttatgcctatacagtggaatattactctgcagtaaaatgtactatacatgctagaacatggctgaacctttgaaaacatttgctaaatgaaagaagccattcgtaacaggctacaaatggtatgattcaattgatatgaaatgttcagaataggcaaatccatagagacagaaagtggttacctagggctgggaagaaggctgaagaaaactggggagtggctgataacgggtgcaggatttctttggggattgataaacacgttctgaaatgaattatggtgatggttgcataactctaaatgtactaaaagccatcgaactgtacactttcaatgggtgaactgtgtggtatgggaattatatttcagcagagctattgtataaaaaaactcaacatagtcaaggtgaactcattctctatgcccaagaaattgtcccgtccagcatttctttctttcttttcttttctttcttttttttttttttttttgagatggaatttcactcttgttgcccaggctggagtgcaatggcgctatctcggctcactgaaacctctgcctcctgggttcaagcgattctcctgcctcagcctcccaagtagctgggattacaggtgcatgccacctgatctgtccgcctcagcctcccaaagtactgggattacaggtgtgagccatcgtgcccagcctcagtgtttcttatctcaggagcatccacccaggtcatgccagaaacagggtttcttcttcacacccctcaccttcggcattgcttcctacaatcaccactcggttaagagtggcttcttgtaaagggtgagatgtgaagccagaggaggggcttttactgtttcactccatactttgttcacttacatatggttggaattaaatatatgacttttgcagctgaagataaactgatcgctgatgtgtactgtttgtttctagatagcctcagtggctgctctgtctactctcttgctagtgcccatccctcctctccacctccagtgccacggccctcatctaggctgcagctcggctgctctgagttactgctgcaaaagctcacttcctactcgcatctggatctgcccaggccattatttctgt

SEQ ID NO: 867 - DNA, 831 bp, Homo sapiens
agtggggttcccggcgcggggaatgtcccgggtggagctggctgagtcgcgcgctctgctccacccgacggggctgtgtgtgctgggcctggctcgcggcgaaccgagatggcagagcagtcggacgaggccgtgaagtactacaccctagaggagattcagaagcacaaccacagcaagagcacctggctgatcctgcaccacaaggtgtacgatttgaccaaatttctggaagagcatcctggtggggaagaagttttaagggaacaagctggaggtgacgctactgagaactttgaggatgtcgggcactctacagatgccagggaaatgtccaaaacattcatcattggggagctccatccagatgacagaccaaagttaaacaagcctccggaaccttaaaggcggtgtttcaaggaaactcttatcactactattgattctagttccagttggtggaccaactgggtgatccctgccatctctgcagtggccgtcgccttgatgtatcgcctatacatggcagaggactgaacacctcctcagaagtcagcgcaggaagagcctgctttggacacgggagaaaagaagccattgctaactacttcaactgacagaaaccttcacttgaaaacaatgattttaatatatctctttctttttcttccgacattagaaacaaaacaaaaagaactgtcctttctgcgctcaaatttttcgagtgtgcctttttattcatctactttattttgatgtttccttaatgtgtaatttacttattataagcatgatcttttaaaaatatatttggcttttaaagtatgcacc

SEQ ID NO: 868 - protein, 98 aa, Homo sapiens
MAEQSDEAVKYYTLEEIQKHNHSKSTWLILHHKVYDLTKFLEEHPGGEEVLREQAGGDATENFEDVGHSTDAREMSKTFIIGELHPDDRPKLNKPPEP

SEQ ID NO: 869 - DNA, 807 bp, Homo sapiens
agtggggttcccggcgcggggaatgtcccgggtggagctggctgagtcgcgcgctctgctccacccgacggggctgtgtgtgctgggcctggctcgcggcgaaccgagatggcagagcagtcggacgaggccgtgaagtactacaccctagaggagattcagaagcacaaccacagcaagagcacctggctgatcctgcaccacaaggtgtacgatttgaccaaatttctggaagagcatcctggtggggaagaagttttaagggaacaagctggaggtgacgctactgagaactttgaggatgtcgggcactctacagatgccagggaaatgtccaaaacattcatcattggggagctccatccagatgacagaccaaagttaaacaagcctccggaaactcttatcactactattgattctagttccagttggtggaccaactgggtgatccctgccatctctgcagtggccgtcgccttgatgtatcgcctatacatggcagaggactgaacacctcctcagaagtcagcgcaggaagagcctgctttggacacgggagaaaagaagccattgctaactacttcaactgacagaaaccttcacttgaaaacaatgattttaatatatctctttctttttcttccgacattagaaacaaaacaaaaagaactgtcctttctgcgctcaaatttttcgagtgtgcctttttattcatctactttattttgatgtttccttaatgtgtaatttacttattataagcatgatcttttaaaaatatatttggcttttaaagtatgcacc

SEQ ID NO: 870 - protein, 132 aa, Homo sapiens
MAEQSDEAVKYYTLEEIQKHNHSKSTWLILHHKVYDLTKFLEEHPGGEEVLREQAGGDATENFEDVGHSTDAREMSKTFIIGELHPDDRPKLNKPPETLITTIDSSSSWWTNWVIPAISAVAVMYRLYMAED

SEQ ID NO: 871 - DNA, 107432 bp, Mus musculus
  misc_feature (1)...(107432): n = A, C, G or T/U
atgtaaatggcagggcttgtgctgctttggaagcttcagtttctggggtgttaggagcaagtctgagggaaactagaaatgagtttcattattattttgatattccatttaaacccaacttaccctttaatacagtctctctacatatgcatatatatatatatatatatacacacacacacatacacacatatagtttattaaaggtatatacacatatactttgattgtttacaagattattacatttgttatatttaaagtgtggtttagttaggcaataatttactctttgaattgatttataagcctctgaactttgggggattaatctcatactgtttttaccaagttataaaaatcagacaaaacccggagaagcaaaactcttccttcctgaacttgttgagtgtcaccacaagagcctacgctgacttgctgttgggattttcagtttcagtatctgctctctgtgggacaaactaggcaggagatcaagtcacataagagtcatagggacttaggagagtaccctgagggatccatgtggggttcttcaagggcagcctgctgcggctgctgctcaggtagcttcctaaggctgatacagtggagctgagttctgagggctggacgaaggacctgcttattggaagactcagtggtgggaaaactgtcatatcagagccccaggcagccattgtaactgaagttgacttagtgaagaattgggtgtggtgcagaggggctagaaggagtcgagagtggatggggtgtgtctttggggtcagagacaggtggagggttctgtaggcatccaggctgagtcgcacgcatttgggtcaagtgaacatgggagatagttgaagccaagatgtgcatgaacttaaagggagtgagggtttgtctgaagtggtgcttgctcctttgcttctggcatagtcattgaatcattgcctgcattgcctttgatttcctggtccgtacacctcatcctagcaggcattgtgctgcaggctgggcacacagacaaaccagataaatcgttgactcttgggctggagagacggctcagtggttaagagcactgactgctcttctggaggtcctgaattcagttcccagcaatcacacagtggcttacaaccatctgtaatgggatctaagagagccacagtgtactcatatacataaaatagataaatcttaaaaaaacaaaaccaaaaaccctttcaccctaaagtacaagaaacgacaagaaatgaaataaattatggactgatggtgctctcacttcattggcttcctaggaagaaaagcgatttaggaagcgccccagcaacactgagagagtgtgtgactgactcacaagtcacaccggcggggttcatacccatgtgtctggacctaggtcctatgccatttcctgtatacccttcacctctcattctgctgaacactggactctattttgtatttgaggagatggcgatgactggcaggtgtggtggtccttgtgcttgcttgcaggagtaaggaaggaaggaaggaaggaaggaaggaaggaaggaaggaaggatggatggatggatggatggatggatggatggatatgggcgcttcaggtcctgtgctccagatcctgcgcagggattgcgtgagtcttttaggaaagactcactgtggagttctttccctgtgcttttccagacatttcttgaatattagtgttgtagctgaagacttaatggcacactgatcaaactgatggctggtgtcagccaagaagtgtagttacatgttagaagtccttaaggatctcaacaagtattgcatcaggttaggaacagtggccaaaaataatcaaatagaaatagcagagatacatagacttctgccacacggctcaactatcctatataatccaggtgtccactacacgatggggcaagtgcgtttggtcactgaccagggatggccatggagagagaggagctacattaattttaggctacattaatatctgggtaggttttggaagaaagtaaacaaggagttaccctgaaagcttttgtgtgaaggggcaagaatgggtatttcttactccaaaaagggaaggagctacaggtgtctcagataatccatcagaggtgtggagtcaagctcctgtgggtataaatgacaaggacatcgcctagagaaggaagaagcagagcgtccccagtggcgggcacctggaggggctgcagactagcaccagtgctgctcttttcacttctacagctctgagcctcactgctgactccttcaccacactgacgtgtggccataggagaatgcactgaggtgccttggaaataaatgacatttgctgccatttgacagtgtcagcaaaggctctgaatgagctttcgagagggtggagtctatgaacctccaaatctgagttaaatttaggacctcagcacatcatagatttttttttttaatttacttttcaagttttgggacaaggcctcactgtgtagccctgaatagctaacctggaacttggtatgtggcccaagatggctttgaacttgagagagagacagagagggagggagagagggagggagggagggggagagagagagagagagagagagagagagagggagggagagggagagggggagagagagagagagagagagagcgcacatatagacattgccataccattcttttaagaaaaaagagctctcttcatcatcaaatgtcatcacacagttccccgagtgtgttagggagtcctgactgggaatctaaggctgctgtggcagtggttgttctccagagcagggtgagtggtctggcacccccaccaccttcctctcatgctgctaatggagcatagtcatgggctgcaccaagagtttgctgtcttggaatagccagcaggaaacgttttctttggctttgtctaatgtctgagagatttcacacctgtatccgtagtgaatgccagacattttgtattggtagaagaatgtggtagagggtgttgactcctcaagtcccagtgacgtagatccatcttaaatggactgttctgtcccagtacaagtcaaggcacacagtctgagaatcagacctgagcccataatgttctgccccttggagccttcctgtgtcatctggatgggagtccattggcctttggttctgtggaaactgagaaccgtggtactttaacacttgaagatgactagatgcttttatgaaaggagggaatgagtctttggagccctcctcttctagggaaaccaatgttaaggcctttagaatggttaccgaggaagtcacttataaatgagcgctgacatcatgtgtgtctgctgtcctgcatgcatgaattgccaggctgagtaccagtgctgactttttgtcctgaaaagctttcctttttatgatcagagctcctaagcagttaccaagtggccacagctatccagatcaactgtgtataagatgagaaagagcaccaagcctgagtgtggtcaagggtgtgctagggaggtcggaaatctcgtagggaacacgaaaaacatcataaaggggtgaggtagcagcataagactccacagaaactgtcacagggcagcccggggacatttcacagtggcatggtagcaggtgctggtgattgatgtacagcgaaggggacagatctctgttggggcaagagtgagccccagctattccactggcttctgccctgagcctggatgccagggagagagctcagtgctggactgtgggtctcagttcttccctgctgcagaaagtcagggcatcggaagcactgggttgatagagctgtagagaggaaattgctttaccgtatgacagctgtacactggccccagtggctgccctagtccttatcagcccttttcacagatctacacttgtatgcatcacaagtactactcagctattaaaaacaatgaatttatgcaattcctaggcaaatggttggacctggagggcaccatcctgagtgaggtaacccaaccacaaaagaactcacatgatatgtactcactgataagtggatattagcccagaaacttagaatacccaagatacaatttgcaagacacatgacactcaagaagaacgaagaccaaagtatgaacacttcgccccttcttagaattgggaacaaaacacccatggaaggagttacagagacaatgtttggagctgagaggaaaggatggaccatctagagactgccgcacctggggatccatcccataatcaacctccaaacatagacaccattgcatacgccagcaagattttgctgaaaggaccctgatatagctgtctcttgtgaggctatgccggtgcctggtaaacacagaagtggatgctcatagtcagctattgaatggaacacagggcccccactggaggagctagacaaagtatccaaggagctaaaggggtctgcaaccctataggtggaacaacaatatgaactaaccagtaccccagagctcatgtctctagctgcatatgtagcagaagatggcctagtcggccattattgggaagagaggccccttcgtcttgcaaactttatatgcctcagtataggggaacgccagggccaagaagtgggagtgagtgggtaggagagcagggtcgggggagggtatgggggatgtttgggatagcatttgaaatgtaaatgaagtaaatacctaataaaaaataggaaaaaaaaccccagactgtagtttgtacattccttccccatgtccccacaccccactgtcttgctatggcatgcttgtgcattgcttttgtgactgtagagtagttaggtttgttccggtttttctttgaacttttaggttgcagggtttcaggcacttggtggctcttactatatctatcgtatctgactgtctgtctatttatcatctatctatctatcatctatctatccatctatatctatcttatctgtctgtctatctatcatctatccatccatctatcatctatccatccatccatcatctatccatccatccatcatctatctatccatctctccctccctctgtgtgtgcgcacgtgtgcatgtgtgtgtgcgcactcgcccgtctctgcgtacacctggtagagcgtgtgtgaggagcagaggatagcttgcagaagtctgctgtctctcctactgtctgcatcccagggatcctgctcaggatattatgcttggcagcgggagcttcacccctgagccatcttgctagccctgtttatagttttttatacctgtttgttccagtacttgttcatactaggtttgattatttttgtcagcttcttaggcgatggggtattacttcagtcttttcgtagttaccagcagcaggctactttccccagtgactgaaaagctcttgtttaatccgaatgtgtaaatacattgtagattgaggtgtgaggtttctctgttgggggtgtggggttgccaagcttttctccagtttgtggtttaagaaattgtactaagaaaatcataacaaaacatttggtaaattaggtccttaatttgacatttaggggtaaaataaacttacataggtatcctcactataaatacatgtgtaggcatattctgaaatggtgactctgagtgactgcctgaatcacactgacatctaggagctgttgccttccagcttggataatttacccaggaggactcccaggctggcttttggaaccctataagagcacagcaggactttgttcctgttgtgcttaggtctatacccaggtctgctttcaaactgggtcacacttcctgtcctcacgacctactcccatgcatgggggactgaggctgttggaagacaaaacaggcaacatcaagtgcctgagtggtatgtgtgtgtctatgtatggtgtgtgtgtgtgtgtcttagagggagagatggggaaaggagggttattggttaacaaagcaatttgaaagtcttaacaagtaataaaacccagtctggttgtgggctagtggctacttgcatctcatacagaaagcatgtgtctcaatgggataaaactcacaggtggccttgtgcaatgtgcttggaaagaaactctaccagagcaagccactcagtgaggtgcttggagaccttggaccagaggaggcctggtagagcatacattttatgtgcgaaaggaaaatagtcacattctagaagcatcctacctgaggactggccaaaaccagcagcaggatgtgaggttcttcgtgcacaggaggatcagcttggcctttgtcttccctggaacagtcttggttttgaatgacactgtggtttctttatagagctagcagtgaagagctagggcgaagctgggctacttcattacatgttttaatgttcaaatcagcaagtgctcagagggatggatttggattgtggatgagtacctaaggtaaggagaggtaaggagagaaaggaaaaattaaataatgtgccttatctgagtaggcctaagatttcatccaggaagtctcccaagcgagccgatgcctctgagctggagagactctgtgtctcatgttcttgagttttgtgagtctggggtttagctgacagtttggactcgagtgcaaattaactgcattttacctaggaccaagttgctgagacagacactacagaacagttgcctccactgctgggcgagtggcgcctgggctggcgtcccaggcccgcattctgcactctgcacattttacaatttaaactctgtgcttccgtcacggcagtttggactgggcattatgttgaggggaggtgagaggctcctcctgtgttggcaccgtctgaccagtgtgggcacagggctgctgcagagccctgatgatgggatgggccactgtactggctaactttgtgtcaacttgacacagctggagttatcacagagaaaggagcttcagttgaggaaatacctccatgagatccagctgcaaggcattttctcaattagtgatcaagggaaggccccttgtgggtggaaccatctctggctggtagtcttggttctataagagagcaggctgagcaagccaggggaagcaagccagtaaagaacatccctccatggcctctgcatcagctcctgctccctgacctgcttgagttccagtcctgacttccttggtgatgaacagcagtatggaaatgtaagccgaataaaccctttcctccccaagtgcttcttggtcatgatgtttgtgcaggaatagaaaccctgactgagacgccaccaacttgatggcaaacacacagcctctctgtggccactgttcctttggctgggtttgaaattaccagttcaaccatggaagaaagttgtgttttgtcttggaaagaacctggagaagaattcaccctgctttcataagcacacattgtaatgtcaatactctgaggagagcttagttccagatcttggtgttgccacagacatgtgtctgtgtgtttgtcaggactgccgaggttacggaagagccatgtgctgactgaggaaaaccatatgccgtcgctcatttccagttattttaggtgtaagttctttcgaggtgaaagtaatagtttaaacccccaatctgtgaatatgctggcatatacccgtctcccaatctatctgtgaatatgctgggatatatccgtctcccaatctgtgaatatgctgggatatacccgtctcccaatctatctgtgaatatgctgggatatacctgtctcctctgtgttccacagttggttcattgttgacgggtgggtgtctctgactgaggccaggtgtgtcctacagtggcctgccactaaggctgtgtgtcaactgcctgcatcctggcacagggacatgatgtctttctcctcacatccatcatggctgcgcatccctgggtctccagtgcagtgcagtgcacacccactctgctaaaatcatcacaggcaggcacacggctgtcatcagatcactaaaatcaacaccaggtgacctggaaggagaaatggccacctgcagtcctgtggagggaggtggggggaggagcaactgggagctctcacaactccttcagccgcctgttgctcccctctccctctccccaccattatgcctcagggctgacagtgtgactttttttgcagagctcagcagatacctgaccaagctgagaatgtttgtgggtccaggctgcccaccttctcatgtggcctgctgggctctgtcggcagtttagttgctccatgaggtctccacctcttcgatgacagtatgctccctggaattctgaatgcagtttccgatgctctggtttctttgtggtctgttttccccttctgcctaaatggcattgctctcttttcttccatcattctctctgtcccccctccctccgcccccaacacacacacctttcaaactttatgttcacacttcccttatactcttgatcctctgcctcagtctcctaggggctggaatactcgccatgtgccttctacctggatgaagttaatggctttacttgccaattcatcccccgtttattgagcatttactttgtgccactttgacctttcacgttacatcactgttggttcccagtctcgtctccactgcattttcctcaatccctgtcttaccacctgttgttcatcacattgcagacttcaagtctgtgtgtatatgcttggagtctggccttgtggcctctgtcactgctgtccatttagaacctctgtcttacctggccagtgtggcagctggccctgctttcagctacttcctgagggggcagtcctgccaggtggctcaggtgacagccttctatactggcacccaggggttatcagaagaggcagcctgagatgacctgtcaggcttgctcatgctcaggcctcagccctgttcaacaaactcccagcctcctgcatggtacaaaccccaggaacatccatgtccttaggcacaccaggtcatttagcttctgatgttggagctctgtgttgtctctccctccctgagcctgcatttccacttagtctgcacatcttcctgagggtccacatgtgcttacaccttgtgttctgggagcctggcacacagtaggtgtccacacttgattctatttagtctgcacatcttcctgagggtccacatgtatttacaccttgtgctctggaagcctggcacacagtaggtgtccacacttgatttggtatctgtttgtgaaggctgtggctctgtggcctttggtgcaggggagttttccttcacagccctgctgctttgaggagcccaggctgtgagggccctgcttgaagttctgctcctacctctcttggtcaagcagtctcactgatggccttggcctgaggctccaggactgattcaccagaccaaaaataaaatccagggtctagatttgaactgctgtgcttggtgtgatgtttactggcctgtgactcgtaatctggggcttactgctgcacactcattacctttggaaaactttatctaaaaacatttttcattacttcagtgaatagccagggcacgaaggcttctttaagacttgtaagctcaggtctagaagatcatttttagatgacagagttctggggtacttggaatcaaaatcgtgtttcctgttttttaggatttttagatatttatggaatagaatttttccttatagtgtttattccagatctgaactttaaaatcctatctgaaagttagtaaaaatattttttcctttaatattctgggataatattaatactttagaattatgatcttttatctcaaaatttaggtagatgtgttaaatgcatatatttaaacacaaaggttgtatttgttataagtgatagctagtaaacttgtttctttgtttatatttcttcacagggcagcccgatggacccaatggtgatgaagagacctcagttgtatgggatgggtactcacccccactcccagccacagcagagcagcccatacccaggaggctcctacggtcccccaggtgcacagcggtatccccttggcatgcagggccgggctccaggggccctgggaggcttgcagtacccgcagcagcaggtcagtgtccgctctctctgtcttccagggctttgttgagagcttttgtttttacctgttgatttctacctattattggtattgagaggatttggggatgtttctgtgatatccccccttttcttttatatagatggaaagtagaactcgcaatcaaatagaccattttatttttctctgtccctgtctccctccctccctccctcctcccctccttcccttccttcctttttttccttcttgaaattgtacttgaacaatgtggggaaagctcctgcttggtaaggcagtgttgccccttccagttccaagggtaggccctcagatgctgacctgtggaaagactccttagggtgaagttttccagtcattcaaagttctgtcattgttgcttgagttaatctggttgttaacccaggatgcccttagactcagtctcccagaggggcattacagctatacgcctccaacctgggttagaagcttcccgggaagttactttgcattgattgtggcatgttctagaagaagtttcagtatttcatttgtgaatttggttagttgtcttgggtaagagaggcctttcctgctcttaaacagaaggctccatcctttcctcccctccagaaccatgtggttttacccacccatgacccctgcttgtattagcacagctcagggtcttcctggttcttacagtttccttgatagattggtcggcggaggcatgggtcctgggaagggcacggttagatccagactcgtcaaggtatttagcgagtgggagcaccagaaaggctgcttacacactgccctagtgtgcctggcatccctgagggccatgaggcgaatgggggagcgctttactgcctccagactggggcggtcctgtaatggtggtcctaaagccggcagtcagcagcagcccttccccacaggaaacgcttctagattttacagaaactcttccttgaggaggcaagtctgatgaaactcttgtcctcttaaaggtctctttagtagtctgagctgtctgctgtagttgagtattgtcagccctcatcttgcagtcacagggaaggatagaattaggtcattaggtcagcccttcagccctagcatggatcctcagactgttcttggtacattattggcaacctccctccacagtgtcaaagacagctctgagtgcaggatcaccctgcttccttttacccgggttttctgccatactttactttcttcagagttgaagcagcagattatgtgtgtctgtagtggggtggggtagggtggggtagaatgtcccccacttcctcaaccccgacaactctcagctgttcccccaccatgaaccttgtattgttagagccgctttcctctctgtgaagaggagaagccccatgtggcagggagctgaaggcctccccttacgtacagtctatagaatggggtgcaaagctctgtctgctacggaaggaaagaggcagagaggagagcggtgggctggtgcaccatgattcttgtgcccgtggctccagcctgttttcccatgattccctgatgtgaggttgtggagtcattctgaaaatggagagccctttctctcgtccctaaggaagtccagggcttgttagttttagactgtggcctagtttaccaaactagagtgagagccaaatataggaagtttgtgaagaatggctagcaaggaaattttatattattttcctcctcaagtgtgtagggtgaaaaatagatctgcagtaagatgtaatcttcgttttcttagctccttggttttatgtagtcccatgacccttacacacttatttgaaaggacaagttgctgatgacccatcaagctttgcagcaaatggcttcagtgtgagtttttaaaacattaataattgtgagtgtatgtatttatacatgtgtgtgtgtcacagcatgtctgtggaaattaaaggatggcggtaggaactgtttctgaccttcaagcatgtgggtcctgggattggactcactttgttcggcctgttggcaagcattgtggcccactgaaccatctctctgccctcagcacatttgcaattaagattttagctcaggtatttactgctaactaaaaagaaatatccagccgggcgtggtggtgcacacctttaatcccagcactcggaaggcagaggcaggtggatttctgagttcgaggccagcctggtctacaaagtgagttccaggacagccagggctacacagagaaaccctgtctcgaaaaacccaaaaagaaaaaaaaaatccaagtcaggtgcataaatatttctggtgatgaaaagaacatggtgaatgttctggctgcagaaatctcaagctttcacgggaagttagtcaaagtcaggcctgtaattggctgtgtgttaacctttcagtcactgcgagacagccttgtctcattttgaattttcaaagactaaaaaataggactaaaaatagtttggaatgaatttctttttgagtgcttgctcacactgtaaaggagacagagcgtcaggtattgatgtttctcctcacccggtggcactgtgcgttgaccccagagcctcaggcataggagcaagccctcaaccactgaggcaaagcctctccccagtgcacacagcattgagaacacagatctgcagaatggttcttagaggtggaaacagagtagctagtaaaggttttgagaagtagttaccagatcacactgcacatacatacatacatatgcacacactgcatgcacacacacacatctgtaggctgggtgtacttgtgcacttagttgcatgtgcctatttaagaaaggtttttaaactggctttaacctcacagtgtaggcaagagtaggtttgaactcctggtcctcttgcctctatctcctaaatgccgggattaaaggcatgtgctaccacactgggcttttggtctggttttttcccccctccaagatctggaaattttaagtgtgtctgcagcaaggtgcaggcactatgattggctattcatcttgccatctcctctggggattaatgtaactggctgagcattgtagtggcgtaggtacagcaactaaggttcttacgaggagtgacgggcggatgataattatgacactgagggtttactgagtggacatcaccacctaggcataggcatagctttgctttggatgccttccaaagctttctgtgcttggtttgtgaacctctaatgagctgagtccagttcatttagtgttgctcatatatttctgcagaggtttgaaatgcaggaattcaactttgtaaattgagttgcccacttaccagctgagtggtaagttgtctttggctcaggggtcacagtttgattcctggctggcactctgcttctgtgataggaatttgaaatgaggattcccttagaactacggtacttgattggaatgccgccctgttaggtcagcgcttagcctttctctctcagttaggcggagctggccactgactgggtgacattagtgttaaagccattggttcttgttttgtgtggtggtcgttttatttttgaaatgtacctgtgtctgacttactgaagcatggtgtggtaatagtgtgctgcttaggtttctactgactggaactagatttgtggtcttcgctcgcttgcttctctcccacatcatcagacaggtacatccctaaacagatcagctttgcaggctcccctaaaacctcgtctatttgatttttttattgagttgagggggaaatgagttttctatgcttctgtggagaatgttctgcctgcaggcttttggagcagacctggagggtcagcaagccggtgatttcatccagtacagagccacccagaagtgcagcttcaagactggctcgcacgcactgactgaggttttcagggctcgcttttgtttttgttttttaacttaaagatactagggtgttctttgctgggtcaggtgtgtggattagcaaaggccttatttcatttttttgcagattctgtactcataaatgtatgtggactgttgacagcttactctaagagattttaatataaaataagtaacagtgataaagaataatgagcatagaagctgagttttattagtgtgggtagatttaaaacaccttcagagactcccctcccaggtcttggattcatgggggtttatgtctcagctgtctgtaccatgctgcgtatctgggaccaagacccctggtccttagacagctgggagacaggaagaattggacatttgattggatgtttttagtttagcggttttgtttctttcttttgagactatgtcttgccaagtgggccagactggcctggaacccagagatcatctcttcctgtcttctatgtgctgtgactaaaggctggtgccccacactcagcatatgagcatttttatgagaagaacccacgtttttagtttttacgaagacctttacaagaaagtgtgggatgtgatcattgtgaaagtggccaaatttagtagaagttagtaacttttgtgaaggtgttttatctgaacatatcaattcaaatggagatacaaactgaattaaaaatggattcttctacagatgacctaagatgagatgaacacgctaacctgtgtttgtttgccatctccccttcctggccatatctcctccactgtatatttatttcagagcagaagcgttttttgttggtatcatctttgcagccaaaatgcatcttcaagtacacattagatagttctaaaaaggaaacaaacattacaattgcttggcaaaaagaaaccttttctttgtggttattaaggcagctgagtggtttccaggatccttacctgggttgttatatttttgatatagtctagaaaggaattctttgtatgcacttagaagtcataacttagtagagtttgcagagctgttgtgaaaggtaggctttgtggagagaaggcttgttcacacaacacttcagacgtgtgcttgtgaaacgcttgtgttaggctctgtccattggaagtctgaaaaggtcctgtggttttggttgtgtctgcaatgctcagctgtcctattttcgaggggcgtgactgagtgaaggagaaggcttgacttgggacagtgttgaggaatctgcgcctgttatgtcttacacttagaatcttaagaggttttggtagtttcatatttgcttacaaagatccccacatgtctgtgtgcgtgcatgctcatgaactggcttataaaacatttgtgtggcattttcccataatgtattctatatgctaaacatagtttatgtacatacagatacatatatgtaatcccacaactacagaagatgaaggcaagggttttggccgttacagctataaacgctgtggggtttattggctatgtggttcattgcattttatgtggttgtcctatgtgccattgactggagctaagcagctttgctttgcagctgagatgctgggacctttttttcactgactttgttgcctctgttgctcatgcagtgaacacgaaggtatctaagttttatcaaaagactcatttagagagcgcatgtctgcttgcttgaggagagatagcagatgtccctagtacggatgccagtgtgtcctatagatgcagtttcctactaaggaagtatttctgaaggaattaaactcctgcaactcttgtttcttgtagttagattgaaacactttgagacagtgtgccattgtcagtaaatttgaattagaagagcctgctgtgagtccctgtagattttcagacctttacttttctagaagtaaggtgggatgcgctttagtgagaactgttaggtgctcctcttcgcttggtttggaagctaccttggcatttgttcttcagagagcatttacagaattctagatatgcggcaggtataatatcctgcctgctctctgctgcggttttactgtattctttcttgtatgatttctactgtgtcttatataaggagaccctcaactcaagatccctgctacattttcctattatagttttatttttttaattttttttttttctgaccaaagtgcaagctttgaaaagtgacatcctgatttttatttcatacatattggtgttttgcctgcatgtctttgtgagggcgtcaggtcctctgcaacagggggtatagcagttgtgagctgccatgtcagtgttgagaactgaggcaggatcctctggaagagaggagcgctcttaaccgtggagctgtccattcgtcacctatagttttattttatttttcaaaggtgtgacttatttattttatgtacatgtgtacactgtcactgtctttagacacaccagaagatttcatcagctctcattacagatggttatgagccaccatgtggttgctgggaattgaactcatgacctctgaaagaacagtcagtgctcttaactactgagccatctctccagccctatagttttatttacggtgtgtgtaaatcatcagtgaggatttcaggtagcacagaatcactttaatacttttaataaatctcactcacttgctgtcacccccaaacccagtaggacatatttatgtgaaattattagccacagttgacctcagtaaaatcaatcaaccgcattcttccattgtttcctgaaaacagaaacaaaaacaaataaaaaccaaacccaaacccccagaggattaaccgaaagagaaagtaagtatggcattaggttgggtggctctcccgctctgctgaggttggcatctctgaaaccagtttggagccctgatggctgctgggatggccagccctgtggctctcagagctccttctgtgatggtcttgaatagctgcatgtgcgagttcaagttcagcgctccttctgtgatggtcttgaatagctgcatgtgcgagttcaagtgcttccaggcttgtttggttgaccaagtcagaatgtcaccccaccctaaaggactgaaattggccggaatcagaggctgggacaacacggtccttgccaattaattaacctgcttgtgatgatagaaacctctagactccactgtgtttatgtgcataattaaggatgtttggctaccacgtttcctggtgtggcttttgcctttgaagtaccaatgagctgatacaacctttgattgcagtatgaaattttagtctgctcatttaatagtcttaaatatctttgggctgatggcttgacaaattgtgttgatgtcacagctgccctcaacagtgtcaagaattctttctaaaaccaaaggagtggtagtagattgttgaaatgagcacagcgtgatcttttaatttttttttacttgtgaaggtattcttgggtaacttgattttgaatacctgtcttatgttagatggaaggcatgcagagtgcgtttctgaggatgtggaaactcgccaggctaatatactttacttagagttgcaaaagaagcaagaagagtcccttggtttctcagtggttcagaaagtaagcctatcttgtgaacaccaaggtaaatggtttaaatgaagcacggttcctctgagctgtcgctgctgttcttctttagcccccagagctctgtggcgtgaatcttgtattttaagatgggtcttatctaaaggttaaaaagaagacatattcttcttatagtagtagctagtcagttacattcttagtggcagtttgattattttatgtgtaataaattgcagatatttgctcttacagtcttgaaaaataatcttaaaaattaactttgtggttgtgagtaaaattaagaaagtgcttccctccctctcccttcctctctgtgtatgtgtgtaacagacaggcagagggggcagagattgatagctattgggcggggactggagagagaagtcactgagatgccttcctcgtcaggagtcctatagaatccaagctttcttgggccttgaaaagaactaactctgtagaggtattagaaacgttggatgttctagagctcagatctgtatgtaagaattgcatataaatatgtaacagacatcttttacatgcttaaagtagttctgtaccaaatttgggttactagataattatatataagaaagtggaagctacccagtttcccagtttctatggagaaatgtgtagtaaacagactgtaacacatagaattagccaaatttatctctctgtattggtatcgactcagagaagaaacattaattactaaaccaatgagccaattagctagccaaccatccagccaatgaaacaaccaactaaccagatccatccatccatctatccatccatccatccatccatccatccatccatccatccggccagccaactggccatcctaccaactgttcatccaagcagtttactagccagccagccaaccagccagccagccagccagccagccagccagccaactagccaatcaactaccagccagccagtcaaccaaccaatcaactagccaaccagtcgatctgccagccagtggaattgactcttcaggttcgtcaagggctataatccaggtcagctttcataaaacagcaaacactccaaacaaagtcagactggtaacagaatgtgcaaatgctggaattaaattaaaaatctgtctttggtgaggtaattatatcttgcttcctggtgattgcaaaactagcttccctgggcagctgtaatgcctagttcctagaagtcttcgagtatatgctggaaggtgtactcctgtccagatttatcacaggaaggacagacaggtgtccagagagtagacctttatgcagtggccttttgcagatggatagtgagggttggacatcgcaggattgtgagttttgtcctgattcgtggggagaagtgtcagagtcaaccatttttggcatgggctctgtgctcctttgaaaagggcagctagaaaaggcccttccttccttcggctttcagatcaccttgccattctgagtttactcttgggtattgcagtagtcaccgtactcgtcataatgcccctcagtgttctagcttcacggggagaaaaggatttattttctcatcttcttaagtgttctatttgtcacaggtcagggagacagatggtgggattttcttcccatgaactggccaaattttgagtagtgggagagaaaaggaaagagaagaatttcctcataaaaatctgctggatcgttgaggagagcggacacttccctcaggcttgatggtgtcttccatattgacttcttcagtaacaaagagcaggaacaatcccggtgacgtcattgctctcagtcttcatgacatcagatgcatcatggcacactttggatagttccaatacataagggatgttcttctaccatggacctgcaaataggagagtaatgaagcctggagcagggtcgaagaggcaggggcttcatcaggattccactctgaggaaaatatcacccatgcgctgaaaaccaccctgatttgaacatcagcagcttgcagcgtggttactttcaagtcagaactgtaatgagggagacagaatcaaggcatggaatgtctgctggcctcggggcacgtggtgggctggttctggttgtgcaggcagtttcttggttctggagtgttaaaaaaaaattcgtttttcctttcccagcccaggtcccggagtgatgactccatgactagttagttattaattacaagcctcccacaagctttggctcattccctggctagctcgtcacttagttaacccattcaaaccaggctgtgtatgcctaccacttggttagttgcctctcctcagtcctgctctcttctttcttcgtgtcttcctcagcatctccctcagtgtctccttgaatctcccttattctgttctgactttagctccttgctggtttatgactgtctctttgcagctcttttcaggtagctctgtctccatctcaaatttccctgagttcgtctactttctggtttacttccttctcggtccctctccatgttctcttgaatctctcttttatactctttcccagaatcccctctctccctgccagtgtcccgcctcctattccctgcctcagctcattggcctttggctttgttattgacaggtgatgcttataaaagattctatactggaggctttgtaagaacacagaatggctttgaacaattccaaagtttctttctttcaaaatatttattttattatgtattcctgtgtgtgcacttgagtgtgtgtatagaggtcagaaggatgcccgtagaggaaggtggatccctggagctgcagtcacaggccctgccctggtgagctgcccaccatgggggatgggaactgaactctcccgtcctctggaacagcagcatccacttttaaccactaggccatctctactttggcaaaagtttctagtgtgaacgtttctcttttgtcatcacctcctgtgcttgtcctacttaatgacagccttgtccatcggctacccaggcacagactggttatctctgctgttctgtccggtagatgagccctgacagggcacttcagaacactttcaaagacaagcatagatttgcagcattgcaggttttggtcagtggactctgtctagcccactgttaaatgttcctggctctggctctgatatagattgttgtgagagtctcaaggaagtctcagtcctgagcgtacgaatacagtcttgctcattagtggcccatcagtatcctgtgcttgtttctgtttgataccacgttgagcctaggatgctgcgcccctgttctatggctgttcatgttgctagaattctctctgggagcaggtgtagcatggaaggaggggcagatggttagagaacctggagaatggagaggggctggattggatgtggctcacttgtcatggaaacccaagccatcatcttcactgtagccatttgctgtgggtattgaggaagactcttggatggtgcagaggctatgctaacagtggacatggtggcctgctgctgctgctaagtttgttgctctggcagagtattccttaatgctggagaagtgttctacatgggatggtagaatagggcagagaaatgggctcagcagttcacacccacgtctgcagcgtagagtttactgtcctaggcagacattatcttcacgtgttttatggggctgagaaactccacggagcttaactttcaagaagagtgcactgcagacctggaatgggaactgttgccgtctgcagtttctgtttctaatgtagaagttatgcttaccccagtgtgtgccttaggctgcttccttctctctcttcccacctctctccctaccccaacagggtttctctggatagcccaggctgtactggaactagctctgtagaccaggccgacagcctctgcctccagcctgctaggattaaggcattgagtggctttcttaaagtcatctctgtgcttttgttccagtggatagcctttgaagggcttccaggaattcagtggattagtccattcttgtcattgtcccctttgtaggccatgtctttatcattgttatgttttccttttagtgtaagtaagccaaacagttgtcactagacggcagagtgaaagtctctgtcaggtctcctgctaagtacttccacactgtccttctttaacccttctgtgtatttatttattttttggcatagttatatttaccaagtatgtggtctgtctggatcagtgttggtttggggtagcccatgccgtcctcacggccttcagggaagaaagctgatgtcatccttaccttgcagatgaggggactgagcgagcaaggttaatcagctgctccacttcacactcgtgctgcacagtagagcaggggctggccgggtccgcagccttggtcttaagtcggtgtacatttgtgattctaagaaacggagcaatactcagcaccaggagttcacttgagtatttaaagagttgataaaatcaaagaaggttccttttgacttctgaacgttagttttgtggaaagtcttttgtgacgttcagcatttggaaggttggctgtgggtctggagatgggtcagtggctaagggtgtgcactgctcatgcagatggcagcttgattcccagcacccacatcaggcagctgcagagctggtggctccagccccacagcatctgtcaccctggccttgcaggcacccacactcaggtaagcatgtgcaagtaaaaataagaagaggaggaaagaacctgcctgccgcgcactgtgctttcagaaaggaagctgcctgctgctctctgtgatctcagagcagagttgtgagagacaatccatgtaacataaaatgaaccattcaagagttcattctgacacttacagtgctatgcggctagccgtccgtcttctgtctgtcatctcaggcgctcggcacacccagctgagactcgggtgctagctgagcagccaccctccgccatgctgctggcagctgctagccacaccttccctctcttgttctgggtgtttcccatatggatcacgtcgcataggtcgccccagtacattgtgtggactgactgtgccttgtcctttcccgccctttacttccagtgagccctgtggttaatgagcgtatgtcggcgtcactggagggtgcagttgctggatgatgcggccatttgcctttctaccttgtgcagctgctaagctttcccactgtggctcctctcccactgcagaaacgacacttgagcattggcctttttatttcctgaggtaataaatatcagggcacctggctgagccttttcctgtctctgagactggggctggtccagagttctacatatgcaaagtggacacttgtgctaatagagagtgtagcccagaaggtcataggcccagagtttctcagtgttagggaaggctgttgtttgtggtggtgtggaaacctcactgttaacagtggatggtcttaaggcagcaatgcttttctctcttctgtgccatggcttgccttgctttatgtgctccagaaccatcctggcatgtctctactcttctccatccgtccatccctccatccctccatccactatctatctatctatctatctatctatctatctatctatctatctatctatctatctatctatctcatggaggtcagaggccagtttgtgggagttgtttctttctttccagcacataacttggggatcagatttagtttatcagatttgtggcaagagccatgtcacaggccccccccccacaccccccgctttgtctttttgaagaccaggctctctcagtttgtgcttggagtagagaaatcaattatttgaactaaagtgattccctgtataaacagttcacactttaagatgaatttacttgcttttagtttaacatgtgggttgaatgtgtgctatgtgatctcccaccagtcactgggaatcccaagagaacctcagaagggagactctgaaggggtgaggcaaagaatgagagaaactgagttgtgagagtgagcacaggtgtggtcctgctctcccactgagttgcctaagagggccagacactcacttggttgggtaggcaggggccctgggaggtgttagtttgcacacatgaaggtggaccctcctactgtctcctgttactatcaatacggtgttacttttggctcattagattgagaaagtattgaggtctttgaggcttgttaacacagttatcaccagatatttattggtaatgtggaggagctacaggcacccttagaggaacagacctgcacctatgcacctgagtgcaatgcgctggtgttgggtgcagttagtgactgtgccctgggagcagctactgcatgggcacatggtctaagaataggtcccattagaccctggtcttgtcagagaggcttgttctaggtctgcgtgagaagcaagctgtttcaagtttcatcagcctttaaaggtttttaggcttttcttttcttgtcttttccgttcttttttcttacagacttctgcaccggtttctgagtctcgccctccttccccatgttcccctttcatttgtatcctggtctggtgctttcctgcatcagctcagggagtaagccggggtgggggaaatcatctaaaattgatctcaataactcagttgagtaaagttaaatttattctatttatatttttaagacgagatactgtccttccacatttagaagcagcactaggttccagagtagagaaaatcccacctccacagatcagaaatgtgcgtctgttaaagttgttttcctcagaggacatttcaaaagtaacacatggcttctattgacctcattttcttccacctgagaaatgatgttgaactgggcctgcgtcagagagccatggtgcctctatgacagtcaagcagagaattcccacttaacactatgggcttcagtgctgatgagtttcgcattgggcaatgggaccctgacagaaatctaaggcagcgcccagagcgtgctgtcagtgctctccagtttgggctggcgtttaagatgaggtaaatgttgtggaaatatacaaagaaactccagtatgagggaaaacgtcctctttttggcaccaggttccctttcttcctcttgccttctctgccatttctgtcacgtaattcagccatcagtgttcatgtgagtccagctgtgtaggactcaaggctgtccgtgtgttccacaggctcagcttcctgtttgctggccttgatgatagtgtcatcacttcagatgtaggcaccggctgcagcccagctccaagccccttgagtgtggtggggccagtcagttggacagaggagaacgtttctcatggtcatggtgagcatctctttgttctttgaggatctgaaagctgctgtctgtacttcggaatccagaactaatacagcctatggcagcagggacaaactcaattaacttagtttcttgtggtatatcagcaagtggagtggacttctcctgggccactcgaccagtgggttcacggacggtgctggcatcctgtgtgtctgtgagtaggtggcatccaagtcctttcttagttttttaagtcctttgtccactgagagccatgcatgggttttgtgtgtcccttttttggggggcacacccctggagaagcttctttgaaaggcgtggtggtggtggggatcagtgtccccagtgtccccagtatcagagggtcaggtggctttgcttgagcacatagatgtggaggttggcaataatctaccctgaagcctctatctccccgtctgtgtgtcccgcagggcgtctgtggaggtgtccaggccttcgtcctttgtatgttgccttcctttttccttctctggagacttcagatgtgttgaattgaaatttgtcttttcccgcttgtttttctagactcatctaatgttaaccgtgtgtgtgtgtgtgtgtgtgtgtgtgtgtgtgtgtgtgtgtgtggttggcaggtgagtgggtattttctttgctaatgtcacatcatagtttcctttgtgacccttggaagttttattggttaaccctgggttaattaactccttactttcacattatcccccactcgtcacctgtttatctttccccctatttcttggcaggtattgttaatctcccctccgtcctgttaggggctgtatttacttttttctttttcacagtttcactatgtatagacttgtttttcttcacaaacttttctgatatcatcatttcaggaagacagcagttcatctgcctttacacagctttagaaaccggtgactgtaaggttctactttcaaagagaaagttctgtgtccttggttgaccagttgccctggtggactagatgacggagtgggagttgagccattttctttgaggcccctcttgtgttgtctgcatgcttctcccactaaggtatccattgctctcagagaggggggtctgctgtgtccctccccgccacactgtttccatggctcctctcctgctggccctccagatggcagtcctcctctgcctgaggtgaggacagggaagggggctctgtgttcctcattgcaggtctttctgtccagctcccaccaccctgattcctgagtctttggggtttcgtgctttaattagcttgcttcttatcctctcacctagaacaaattaaaacattaattatcgcttgtctctctgcttttctccttccaaaaattctttgacctcttgcctgctgctaccccagctcatgttttctctgccctcacagatttagacttttaccttttcattgttccttccgtgggggtccatacatagttataaacaggagccttgatctgtttatggaaacctgtagagacatttttagtaagagcttctcttacaaactgttgtctacatgtttgggtttcagtgtgccacctggtaacactctggctccagaagtgtgtgcattaagaccagaggggacttcaggagataagtatctgcggggtcgattgttggcagggccctggcctgaggagctgtgtgaggtggggctgtctctgtgtagattagccaggagaaagttcgtggtactgaggcagtgctttcagagtgattgctccctcgggtgtgcagggtagggctgggaggacagcctctaggccagtgggttctctgcccatccacaggaggccaggctagggttgctgagtgcctgtgaggggggctgctgtgagggatggtgggaagggacagttttaaggtgaactgggacaagggttagcagagcagcaccacaggaaggcaagggccacaggctgggcccagaggatactctctgtggtgggagtagaccctcagggctgcagctctgcctgctgcctgctgatgctctccctgatgctggaagctgcaggctccttgattgaagccctgccttgctggtctccacctactcctattggaagataatcatgttttcataattgatactaacaatctaacagatatggctagcctcactcctcagagaaagacagaatggcatgtatcacaggcaaaaggtttttttttttttttttttttactaaagtttgtgtttaatgcaatttttagcaatagagaacagaatggaaaaagaaccttctgattcatacttattaagcaacccagaaaataagttaactgtagtagggcaatcaggaattttatctacaggcacagcttcatagtatctgtatgtgtggcccagtgccaagaccagtgtgaaactaaaaacaacaacagcaaactgttagagcaattataacaagtcaactttgtatccttctgtgtcaggaatgaaaaataaagagtccagcttccccggcctgccggcctgccggccagtatttagcattcctgctgctgtttacagagctttgcatatggtctttgaaaccctgcgtgctctttcagcgtgaaccatctactcactcttatcagctttcaagatgctgtctctcacagctctgccactgttagagcaggtccggaatcaagcagggagctgggaaagagctccgctgcagagctcggctgcagaccgccatcctggctggaggttgctaagcttctgtgtacattcctggtgccctcctggtggcctgatccttaggcctccttaagttaaaaatactgggtgtgtgtggtcttggcagctggcacgaggccaggctttttatatcctgctctggcctgggaatggagctcagcagagggggtgcacagtgtggggaggccctgctgcctggctgttctggttttgttgttctaaggaagagacagctgatgctggccctccacgcgcatctttcttttggtctgatgtttgttagagtagccatagagagccaactttagagtttaatttcctttcccctttgaagcctgttataccatctgttagagagaaacttctatgcctaactacttatactttaactaattaattgggcactgggttcctggacatatttattaaatgtcaacaacttgggacatttagtctttgtttttagagttttatgtccagtaggatttttcttaaactatgtccagaatatcctcgggagtgtgcacactgctttacattttttgttatgaattattgattagattgttctgaaggtatccatttgtttcttcctccccacagcagcacctaggaagctgttttctgtctccctccctcttctgggtgctgttttacatactagcatgccagggctaaaggaggcaaggcagactcatcgcctgcttgtgctattagacatccgtacagtgaggaacagtgctgtggagtcttcattgtgaatgctgttcaggctgttccctgcagtatgtgggtcaatgggtggcccagttcaagacctggggcacttcagaagaagtgaggtgtctgcccctggagaggtgtcttctgggagaggcaagcatccatgtgtgtcttgtggggagggagtggctaaagcgcttatggcgtatgattgataagccgattgtcacagtcgggtggaccccaaggaagggacaagcatgtcattggccctgacagtgattgacaaggggaggcaattcacgtgctttctcagatgaagatgcactaaagcgttcttttgcactgttcttcccaaggcctcacggccacatgccttgtgacattcttgggatgtttttacacaaagtgaggtcctttgcaattttaagtattctttacatttaatttatgtttgtgtgtgtcctgagtgtggtgcaggcatgtcagtgtgtgggcacatggaggcctctgttggccttgttgccttgagacagggtctgtcagcaaacaggtgcacattactttctctaggctgcctggccaccaaatctctaggatcttccagtctctgcccccagtgctggggtcacaggtgagcagagctgtttctcacttttcttgtagatgctggggatttgaacttgggtctttatgttggccatagcaggtagtcacctcctggaattgaagactattttctggcagactttaatgggtagccctggctatggccctgcatggcagactcgagcttgccccacttcttagcccatgcgggaaagatcctgctcgttcgttctgaagttggcccagtgcacagaatcagctctcactaggagcacttacttgcttccttctttggaaatggaaactgttgggcagaggggtggacatggcgagggtgtttgagcacactatagcagaccgttttggcctggccaatgtgaatcgatgtgtttttattagagctctttggctgatcttggactgtagcattctcacgttggactgaacgttaacaaaatatggatgcttttcttccttgggatcggctgctaaatgtaaggggctttgtggatcagtgctgcgatctcttcatttgtagggtgggagtccactaagatgggaacttatgtggaggggtttgctgaggttctgagtcagagccctttggaaggcatgttggaataggccatgtaggtggggagagcctcgaactctacctttgctggggatggaggacacttgtgctcttttctctccttatctccccgcccacccgttttaaagtaattctgtaaaatatataagaatgtaactgcttaatgcaaaagtaagaccccatttttcagagataaagtaagtgtgtgtgtgtatgtatgtgtgtagccgtgaataacacagcacagtgctgtgcccctgtgctgtggtttcctccctggctagtgcacctgtgtgtttgctgtgtgctcctctctcccattttgtgtaggctgcacggcaggcctttgtgtggattgctgtgttcaggccagcatgaggggactgatttcactgctgctacaggaggtggtggaggagagctggcagctttaaggatcacgagctcttcctttaagggaatttcctagaagtgaaaagaggccacctagcccatgatcagaaaacaatcaaagcagaagaatggagcatccgccctcctgttgcttttaaaaagtgttctttcctgggtcacaggaaagtgccactggcagcaagtgacctcacttgggggcttcctgggactgcttagcttgggagtggaatatcttgtgtggtctcctgttttccatttggcctttgatctgtctgccttcactcagaaagtttaaaatttacctgtattttgtaatacccaattcatagactataaacatagcctgtgtgttctgagcatgttttctctgttttgtaatctgtgctgttgactgtaaatcttaagacactccttagaggttattctttgcctgcttttggatctgtagtgaaaattaaaggtactttaaagtccagaaagtggatgatgtccactggtcagtaattagtgaactcggtaaagggcagctgctcagagaagtaggagagtctgtggtggctgggcatgtaccagggcagctgtgaagtaacgtggcaggtggctagtgagaattctgtcgttctccttacagtacatctaaaagctcaataactgttgggtgggagtagatgagtgttgagcatttgtggagagtgtacatggtccagagctctatcaccagcatgtaaaaaccaaagcaaaagtcaggcatgctggtgcacacctctgatcctggcactcaggaggcacaggcaggcttatctctgagttcaaggccagcctggtctacaaagtgagttccaatacagccagggctacacagagaaaccatcttcaaaaacaagagccaccaccaccaaaagccaaagcaaaataaaaaagaatataaatgtactagcatgaagcagcttccgttgtgattggagtaagtgcagagctaggatgcactgcacgggaggcttcaggctggcgtggaaggacttagcagcctgtgtctgtttcataatctttttccagtggaaacttaacatttaccaggatgaccttttaaaagtcacggcctgcctcattcatcgtccctctttgaaaccatgtttactctaaaagttgaaaggacattgtcttaagtttttctttccataggacatgtgctggtttgttgtttttttctgtaaaatgcctatataatataagagagtaacaaagcacaaaggctcttctgtaacctcccattggttagccactgaacaaagcttcagaactttgctcatgaacaggactgggctttgccttatgggtgtctgtgtgttcatagtgcacagtgccatgttagaataggctccggcaccctgcgctgttcagtaaaacatctatgaggcaaagaaaccaataaagagaagaatcagtccctcaggggtctgtgtgtacaagtctcgtggtgctggggctgtttgtggtactcgtgaggctgagctctggaatctcgaactgactctgaggacagagaaagaaacctgtggttatttatacagggtccacgtgctccttgtattcaagcctctagctgctcttggcttctgacacaactctctttaattgtgtatttgggaaattacaacaaaaaccaacattttaaaagaagaacttccctccgatggcgaatcagactggtcgcggctctggatcagatttttaagggctccctttggagctgtccagttattttgctatttcagactggcttgcctgtgacattgtagctcttaagataatttagagctgtaggacgttgagtgggtttgaaccatgctgtataatgtaatatggaattttgtaacactgttaaaattctttcctttgcattcagatgactaagtacagtcaacggcgttggcaccgttaccttctgtaggtatttactggctgagtctttctctatagaaagcagagatcatggagaagccagtgcatgccagagctgatttgcttcttaaaagattccaggcctgaagatgaccagctagacagcctttagcagaacggcctggttctggtggagaatgggcccctgtggatggtgtttggcttgcagtggccttggaggctctggtgtgattatctcgatgcgaggcggtgtagaaaacaggtagtttcagtttcgtaaatctgtgttttcaagcagatagggactttgaatcagagtgctgtgttcaaatcacggaagccttcctgactcttgtctctgctttcaaggccgttttaactcaaaagtgattgagagccagaaaatttgacctccattaacacgcacggcgttgtcataagcacaatccttctgtgactacacctttatcccaaccagagggtgtgatttccctccccctgatcccgacctttaccagcagtatatatttttctgcagctgaccacaaggaaacatgtcgggactaactcaggataacttggaagattaaattatgatttaattagaacattctactctggccctgttaataaccaatggcttgtattctaatttcctgtgtccctgagctatgctattttagatcttgagcttattcaaggctgtacctagataacttttttctttttaatactcagggtttctttcccactcatttatgttagagaggaagaggtgtttatcgaacaagtagttttgagaggagacccaaagccttggtgagctgtggtgaggaacagcaggaagctgctgaagcccacagttgagcttccacttcggccttctgtggtgcaagtgtggatgtatctgactgttgatcggcgagcacacttggggttcccggtctcatgtatgacacattaccttgtgccatgcccttttgaaccttcagacataactatacctcagagacagagtctgcaagatgagctggagagcagtgattgcctcagtaggttctgtagagggttaaatgagatgttacctgtgagtaatgttagaactcatggaaaaactagattttgtgtttgtaagcgataaatatttttacaaaatccaactgtactttagttgtgaattgtggtgttaacagtgtgtgtggcaaaccaaagctagctggctcatgctcggtttccttcttcctctttaggctgggcacagcacacagcacagtgctgggcaaaatgggctgggaacagggtttagtttctctctctctctctctctctctctctctcgacttgtacatgaggatttctttttgaattaagaaaattaagactctattgaggcaccttaagaagtgttgggtgctatgggaggcaggtgggagtcggaacatgggatccctgcctgtttctattcttgcaggccccaggtctcctaggcttactggatttcttctcacaaagcacgcgacttcagtcccccaccctccagcattatctcaggactgctcactgatgcctgaaggcctgttgagatgagcgagtgaggccagcccatttggatcctggcagtccagttgcagaggactatctgcctctggatatcagctagcatgccactacaacccattggttgtgtctggatatatagggtatagtagagacagtaagtgcttagagaagttttattatatggagagttcctttgtaaagtgttgaagcatattcatggctgttatcaccgtaaattactctaagcagcgtgcccatcagaataagtgaccagacatattaggctgcaacatggatgagctcttatggttgtgttatcttgttaaatttccataagtttctagaaaattttgtctgtattcattatatgtctgtggtaagttcagggtgaatatttttatataatgctgtatgttctgttaaaggcccaacctaagttacgataatgtcatggtggtgtgtaagttaacatgaagaaacaaaaaggtacatttcaaattgtgaattgtgttttctttcataagaaaacgttctagtattgccttaatgagtggattgtttttgatttttttcaaaagcttgaggtggtcaaggatgtgcaggatgggcatcagctccagaactgctgctctgtgtaagcagatgcaggctcaggactccagggggcgggtgtgccatggagaatggacagggctagggctgtgcgaggagttcagtgggacctgttctcgtttatgtcttctccatgatagaggggggtgtgtccactttattgttagcttgcttaggttttgcaaaattccgtattttagggcagagtttccgatataagttatataaaagaatcatattcttaaggtaaaaggttaataacaagccgagacttttgctaactgtatgaagagtggttaaagtagtgacaggttgctcttctcagactgcctcagggacgtgaatgaaccccaacttcaacataaatatttacccgcctaagatcacagatagagaggagaacattgacttgcatcccaggagtgagctgtggagtagaggatctagctggctgtctgcttttgatggcagagtagggtgacagattgagttctgtaagtgcctgctgttgacatatgtcatagcaattgcagtgctcacatggcctggctgtgggttcttgggcaatgagctctggaggtggtctggtccccaggttgctgtagggttatggtgtggcccgtgtgctgctgtcttagaacagcacgcacatgtatgatttgcgcactcgtagcataccagccattcctccattccatgtgcctgtgagcaaacacaactccactgatgcctgagcctgctcacaccgtgtctgtgacaaccatactgcctgcagttttcagttccatgggtgagcgcaatcacccccctcatagccataatgaccacagttatgtgcagcaactcattccgcttcctagcagttcagtgagccatgtgtcgctgttatctccctttacagatagataatgggacaagagatggaatagcttcccaagcatacctgaccccacttagcatggctgcaggccctgttacctcaccacagtcctctgcctgtccagcatccagtgttccttcctggtctcataggagcacgtatctgtctcattgcttttatgatgcatgtttgcagtatgtgtgccattacctgtttattgtattgtgttaatgcacaaaaagctgggtggtgtcagtgggagtggatagtggaactcattgcccttactgatcagtcttattttgttaaacaaaatgtaaggggggatctacaagagaaatggccgatgcagcttgactagcaagcggcagagggcgtagtgtctgaggttgggataagtgggatacccctcattccctccaagatctgggtctacagagcctgtgactgtgtgtcacacagccctgtggcacctgtgattgagggacactttcactgtgtgacctgagcttgagtgaagtatcactgcgcacagcatcagctcagtaaagattttgtgctttctgtgctttaagtcagtaatctaagttgaaccttctagaaagaaagccctgtttgggtattgggagcgccaccattttctagatgtggaaactgaggcttggactaaggggaattcagctttctggtgacacatcaatgctctcctgtggattttgagaatgtcagggcctggttcctcacgattgatctcagacaccaggcatgggcttcccggggaggtaggacaagggtccagcggctagacacagaagctctggtatgttcaagaccacgcttgtagcatggggttccctggagccatcttccccagaaacatcagccgatcccactgctaatgcagccttctccttcccctccatcagaaggggtctcgtgtgtcccaggctggcctcaaactcacgctgtggccaaggatgactttgaagtggtatcccaggcaagctctgcagtttctggttggagctcccaggctaaccacgggatggaggctgtttctgaagtttctgtttgaattgaaacttctctatggagctggatggaaggctctggccccttcttgaagctgctactgctcttctggtgtgcgcagagatgaaggggcacggtgccctcaatcgcagcctggtagtagctagtgctcctttgaggtggaagggagccacatgtctggtgttttcccgtctgttatcctgtaagcttttgctttaggtggtgtgtgatactctgttgaatgccctgggcacagcctccccttcttgtttgtagggatgcaggagtcagagcggagagaaggctgcttcccgtatgttagcatccctcttcagtgacttgcagaaggcgagtaagaggttttggttctctttgtgaatgttccagtgttcactggcattctgtagtgtaaatgtgcaaagggaactgttaaaaatgtcattattttataattcacagcagcatttgctatgcagcaatgcttaccagcagcttctctgtgttaaacgaaactaaagcatttccagatcaaacctgtaggctgcaaagcatgtgattccttcccagccagtcacatgtgcctgaagttagcatttgctccctgcagtttggagagggcagaacgctgaggtggaaagctgccactgccatgtttcattcagacccccacactcttgtctgctcacacaaccacaggagggttgttcagccatttggtctccaagggaaacaaggacgggcaggagggaaggagggaatccacagaggagcatgaagacagcacctacatttatgtatgggttttccgaagcagcatgggccttctgaaactcttagctctgcgcagatttcattttctaaagttgttgcgatatagattaatgatttgttagttctttccagttttatctggtgttcagaacttatcgcatgtaatgttggaaggactctggatcccttgcagaattaattttttaaaaggacttatttatttattatatgagtacactgtagctgtcttcagacaccccagaagagggcatccgatctcattacagatggttgtgagccaccatgtggttgctgggatttgaactcaggacctctggaagaatagtcagtgctcttatccgctgagccatctctgcaggccccagaattaattttttaacgttgtattttttgagctttaaacattgatctgttttgattttggtggagacgaatggccacagtaggatttggatgtgacatatggtgtatggtgcatggtgggagcctgctagtgtgacctgccggtaatttccaatagtcagaaacgagagactgtttgaaggtagaacttctgccaatggaaaggtagaggcatcaagacagagaaaggctcactacagccctcaggatgagtctgattttcctgctcactgcttatctaacaggcaccacaccaagctgcagagtgctgagcctttcattgtgttggggttgttatagagaagaaaggggtctgagtgttcagtctgcaaagtcctccttctctctatgcactggttctcaggaccattcaccagtgtttagttaagacgtagatgattggcaaccgaggagaatgttccagacttttagaggatcttataaacagaagtctttttttcctggcacttcatttccagcctgaggaagtagatctttctggaaacagcttttgatctcttaaagtaccctgttttgtgccagttacttgcatcctatacagctagtatccacaacctaacaaaaactcagagaagccaggtcaagagaaccatgctgcggccagggcatccattgagggataccctgctgccacagaaggctgagtggtcaggccctgggaacggtgggacgagtctgctttccattgctgtaggaagtatttaaaagagggaaaggcacacggtggcttacagcttggctagttctagtcatgaaggattggcttattgttttagggctgtggcaaggcagtgcacaacatgggccacatagtccaggaagacactcacgtcacggtagccaggaatcaaagaggagtatgtgtatgtgtgtgtgtgtgtgtgtatctttgtgtgttcatgtgtataagtcaccaactcacagcagtagatgacagataaacaggactctgtctctctctctgtgtgtctctctgtgtctctctgtctctctctctgtctctctctgtatgcatttaagaggcaggcattatccttctagtggacatggtctgcacattattttgtagccgtttatgcatgtgttttgttgatgaagaatcccatggagactatggtgtgggtttggattaggaaagtctggagataatgtatgtaaatgctaatgtctttagactgtttctgaaggatcctcatgttgtcctgtctaagaagacacccttgacacactttccgattctgtctgtctgtctgtctgtctgtctgtgtatatgttatgtgcatgtttgtgtttgtatgggcatgagtgggctacagtgtgtgtgtgagggttaactgggagttaattctctccctctactatgtgggtcttgggctgaaactcaggttggtggttggtgggtttagtatttgctgctgctcctgtccgtcatgtcagcctgagttcaggtctgttgtgcggcaccagttatttttagagcacttgaggactccatctgggaagtgaggccctcagagctagaaccttaggggaagaaggtaggtcttggtggcagttctgtggggcatgagtcactgaagaataatccacagtaatcctgttcgttctgtattctaaaggactgcagtttcttaacagagcttcttcaaagcgttcacactagataggacgtgggtttggtttggtttttggtgttttttttaatgatgcagtgtttgtgtgtggtgtgtgtgtgtgtgtgtgtgtgtgtgtgtgtgtgtgattggtgtgtgtgtgattggtatgcgtgtggtatgtgtatatatgtgtatggtgtgtgtgtgtggtgtatggggtgtgtgtatactatatgtgtgtggtaatatgtgtgataagtgtgtggtgtgtgtatatggtatgtgtatatatgtgtatggtgtgtgtatatgtgtgtggtaatttatatatatatatgtatcctgtggtaatatgtgtgttgtgtatgctatgtgtatatgattgtggggggagtatgtagtgagtgtgaggtgtgtatgtgtatggtatatatatatatgatggtatgtggttgtgtgtgtttatgcgtctctatctgtatctcaagaagtcttttagcgtggtaacctcagagccttggtagaatccactgtaaaactgcaggtcgggtctggaggaggagggatgccaagccctgtggggtcttagtagcctgctatctgtgtttctttaaattgttctttaagtaactagaggactattcgatactcacaggtgatttgttttatttattttttttcatcttcaagtgagaatgaaaaattatggctaaataagacagtcagtcactgaaaatggcttataaaccagcagatctctctcatagcagccttctttgctttaagtaattggataggcttgcaaggtacagtgggaattgtagtttccaacttctttgtattctgaaaatgagtaattcctcaggcctctgaggtagaaaaggagagtatgtgctctgataaattgttatcttgtttttcaggcgcatgctttgagcagcacaaagccgccagtcttcagtgtctcccaggggctctgagcttggtcttaagtgatggtagcttataaagcatggcgctgtgctactttgactttgaccctagctttcctctcctgcagcaatccagaatctgttttatcataattttgaaaagtttttatttataccaaggtgatttgtgaaaatggtaagtgaggttgatggttctgtagtgctggctagtttatgtcagcttgaccccagtcagtggagcagagggagcctgtagagaatgtctccattttctcctatagactggcctttatgatagttctttatttagtgattaatggtgacggttgcagtgcattgtgggtgggcccatgcctggactggtggtcctgggttctataagagagcaagctgagcaagccagtgaaagcaagccagtaaggaacatccctccagggcctctgcatcagctggtgcctcccagatccctgccctttgtgagttcctgtcctgacttcctttagtgattgatgaacagcaatgccgaaggccaaataaaccttttgctccccaacttgcttttttgtcagtgtttcatctcagctaaagaaaccctaagcaggacatgagctgtggccatcagagatcgtaatcactgtcctccctcctttggcccctcccctgtacgagccctttcaacctctcgctgagtcttctggtaagtcttccatctttgaggtacaccttgttctgttaccttcagcttacatgctgtgtcttgcttttccctctgggtgaaagccgcttagcattgctttccacttgaggccttgctcttctggttctctccgcacacactgatgctaagttggaattgaccgcggctgtgtttccgatgttcagactgggtaaaagaagcagaaacaagcaatagcttattattattagcttacccacattgtctttggttttcagcagagagtggctggcctgcattccctttgcagagtgtactgccctacagtgtgctgtgctgtactttgggtctgctgggtcagctgtcatttatgttccacaggtctctcttcttgctctttgtggcttatccttggattgacatttgctgtcatctcttgaactgggctgggtcctttgtagctgttctgtgtccttaggaccatcttctagtgggtccctcagaaatggaacagagaagtaaatccaaggtcttgcgtgttggagaattatctttattttaccttcatatgcaaattacagaatgactgagaagagaattttggaagtcacattccatgaacatgtgtgtgtatacatgtgtgtacatatatgtgcatatacttacatatatgtgcacatttatacacacgttattctgaagccaattgatgcacacctacatacacacacatatgattacatttttagatacaggaattcactatctagccactgctgacctggaacatgctttgtagcaggattagatttgtctctgccacccaagggctggcattaaaggtgtgtaccaccatgccagcattcggaagtggtcctcaccatctctactggctagttttgtatcaacttgacacagctggagttatcacagagaaaggagcttcagttgaggaaatgcctccatgagatccaactgtaaggcattttctcaattagtgatcaagggggaaaggccccttgtgggtggtgccatctctgggctggtagtcttggttctgtaagagagcaggctgagcaagccagaagaagcaagccagtaaagaacatccctctatggcctctgcatcagctcctgcttcctgacctgcttgagttccagtcctgacttccttggtgatgaacagcaatgtggaagtgtaagctgaataaaccctttcctccccaacttgcttcttggtcatgatgtttgtgcaggaatagaaaccctgactaagacaccatcttaaccacttatgttgtcctgggatctgaagccatttctggttttgctcctaaactttgctatttctctgtgcctccccacccccacaatggtgtagcttctgacttcctggtgtccttgagctccatctcagcctggccgcttctttggccatgcaccctgactctgagtcacacaaacaccctgggactctttcatctccaacgttatctctacccttcattattccatgttttgtagtctcttcccttactgttcttgttaggatgtcgactcagtgtgctccgtggggccctagtgagcaccagcacccctcagcctcagcctgctgtgtagctgttgcttctggtttggggcttagggctatttctcttctgtttttctttttttttttttttttttttccctcttggttaccctttgtagatgactcccagttccagcattatatatttaatttacaaaagctctttttcatctcctcaaaccttccctttcttatccttaatttctttgttgttttgtttgttttaatacaatcctgttcttatttcagaaaaccatttttctctgaaacataattgactgtgctctgttttacacagtttcattttcttctattatgtctctttttaggttttttttttttgttttgttttgttttttaaattctattttatgttaggtactttcttaaactaccaagaaatctcaggttgtctgagtttctgaggagagattgggttgctgggcattggttgccgattgtgtggagaggggatggaagttggtccctcctaagtttgcatttatatctatctgttctgttggtttggcctggtgttaacccaggcagaggatgctggcatgctcttaacagagaggatcttagcatccagctgctgctgctggtgggttccagcagtgcttctggggcctccgcttagccatcttacaggagtaagactggcttcttccaggatgagggaggacaagctgaacttcatgggagaggatcttcttggtcgttgcttcttcctcccatgtttaggctgtagatccctttcgcagcccctcgcatctgtgcccgccagctgccgctctgcccttgcctgtatccagggccatcaaattcctgtgccctgccagcctttctggtccactgcatgtaagcagctcaggtagtcactgtctgtccgtctgtttatggcttccacattttgctgcagttgttcctgtactcaggagtttgttagaagagcagacagagcgggcaaccagaagcaagcagtattgccattttgtttaggagggaatgactctagatgtgagcttgaacctgctaccttcctgcagatgtctctgtaggttataaatgtggaagtcagaaaggtagaagtttggcttcttctgtaccttcaggtctgcttggggttttctcctgctccgtacagacttttttaacttctgtgaatatgtacacaattgtgggtgacaatctgtccaataaacagaatttttacagacattaaatataatcaacagcctcaaagagtcatgtatattctgttttttgttgttgttgttttttgcctccccccccnnnnnnnnnnnnnnnnnnnnnnnnnnnnnnnnnnnnnnnnnnnnnnnnnnnnnnnnnnnnnnnnnnnnnnnnnnnnnnnnnnnnnnnnnnnnnnnnnnnnnnnnnnnnnnnnnnnnnnnnnnnnnnnnnnnnnnnnnnnnnnnnnnnnnnnnnnnnnnnnnnnnnnnnnnnnnnnnnnnnnnnnnnnnnnnnnnnnnnnnnnnnnnnnnnnnnnnnnnnnnnnnnnnnnnnnnnnnnnnnnnnnnnnnnnnnnnnnnnnnnnnnnnnnnnnnnnnnnnnnnnnnnnnnnnnnnnnnnnnnnnnnnnnnnnnnnnnnnnnnnnnnnnnnnnnnnnnnnnnnnnnnnnnnnnnnnnnnnnnnnnnnnnnnnnnnnnnnnnnnnnnnnnnnnnnnnnnnnnnnnnnnnnnnnnnnnnnnnnnnnnnnnnnnnnnnnnnnnnnnnnnnnnnnnnnnnnnnnnnnnnnnnnnnnnnnnnnnnnnnnnnnnnnnnnnnnnnnnnnnnnnnnnnnnnnnnnnnnnnnnnnnnnnnnnnnnnnnnnnnnnnnnnnnnnnnnnnnnnnnnnnnnnnnnnnnnnnnnnnnnnnnnnnnnnnnnnnnnnnnnnnnnnnnnnnnnnnnnnnnnnnnnnnnnnnnnnnnnnnnnnnnnnnnnnnnnnnnnnnnnnnnnnnnnnnnnnnnnnnnnnnnnnnnnnnnnnnnnnnnnnnnnnnnnnnnnnnnnnnnnnnnnnnnnnnnnnnnnnnnnnnnnnnnnnnnnnnnnnnnnnnnnnnnnnnnnnnnnnnnnnnnntgtgtgatttcctaaccagctgcatcagaaagtacttgagtagtacccaagtagggtcatgatcagaaagacatgtgatcttttttccactttgtttgtatgtggaaatcattgcagatggagcggctggtaacccacagacatttattctttcaatgtggtagtccaagaccaatgtgctgccaggacctgtttcctgatgcgtggcccctgctttctgcatgtgcacctggaagacagggggccacctgggtctgaagtctcatgtaaaaggtctctccttaaagctgactatctaattactccccaaagggtgagctcctgccacctcactgtggccacgaggggtagattgccagtgtaagcattgtggagggatacttaagacaaaacttaatagtgaattagttatttttgtacaaagccacccagaactatatatgatagctctttagatatttaaaaagctgggcttagtgtcacacacctttcatcccagcactcagaagccagagagataggtgcatctctgtgagtttgaggccatcctgggctacatagtgttccagggctgcttgagctacataggactgtgtctctgaggggtatgaggagattaaaagaaaagatttaaagatgaattttggttatagttttaatgattcttgtggtattttctattatatcagtgtggaataggaagattttaaagaattcagctacattgttctaaaaaggtgtcagtctcagaatagcaatcatggtgatacacatttttaaggaagtcatagcttgtaaaaattactcattgaaaagtcttccttaaaatatctgtttccattcaggatgctcatttcttttaaattgacattcattgtaggaaatatttgtatgttttaaaaatgagtttaaagacttgcaactttgtgtcaaaggccatattctcatagtaactttagaaaatttccttaatgatacttcctgtacaaccaagaaataaaacaaaacacaaacaaacaacaagccccaaatgttgcccgacattcgcaggccttgctcaggaagagggccactcttcttttgttgcttcaggctctgcctgtcagaagggaggaataattatggtttttttttctttcttttttagattaatttgtacatttatgtacattaaagtgctcagtgtaatttactatatttgccttataaatattggcagaattccatccttaatgagtttgtaggtcagtaatccaaataaacctaatttactgaaaacagtgagctaagggcctctatagttcatattgatctggctgtctgaggggttggctggacatggggaccgtgtctactctgcttttctcactaatatcagacttgacggtatgtgagcagaagtccaccaagaattaatgacagataggatatgaagagatacatttgtcaaaagtgaactttaaaatggattccttaatagagagtcttagaaacaaaacaaaaataaatgtgacattatcttgtgggaaaaattagttctgagaaagttgtagagtctcatttagcaactttagacacctgttgaaaatattttaagaatatcacttctataacatttccgtgtttcttgttataaaacataacaactgacagctatgactattactagctctgttgtgaatggtgcagtaagctgtgaggctggagcagggccagccatggataaggatgcccatgcccgtcgttcccagagggtcaccatccctgtgggagtgttacccatgcttgctctcgtctacctaggcaattctagatctaactcctggattatggtgtccttgaagaaggacagctggtggctagaatgcccctactggcctggaccccattctctcatgtgacagcagacaaatctggggagagctttgtgcattttggagaacaccatccttcctgcttgtgccagcagtgcccttttgtagtgctgcgaagctcagagccctactttgggcttgagggctgaggcagggttcgggcacagcttcctgtgagatggctgtgtatggcagacccagcctaacgcggaatgcaaagcaccctggctccagaggctgagcatacctgaatatacccttactctagggcttggggtagcagatatagtagcacattaattaactgaggtaaagctcagtctctgtctttgatctcgatagcttacatttttcttgtgctttctagctttatttataagagcttgtttgaactaagtcttgtcaaagatcaatctgtgtggtattttagaatccatggaacatgaattctcaatctgccaggaaaatagaaagcccttgaaaatcatatttaacatggggcatacatcacatggataggtgtataagaattgtgctgtgtttgaacataatctgtatgctaattttttaaagtattatgttggactctggagcaaatcagaaatagtaggttttactaaatctcattctcttgtagccatccttagtaatgattctccttcccctgactggcaattttctttatgttttatagttgagatttccattcttgtattttaatatgtggaacctttgggtttctaatacactagaaatgcctttatagtttatctcaataaatttgatgactagaaagtaagtgagccctctacccttttgataatctgcaagaagaaagacgacttgctaacagagatgtaccagcagggctgaatctaataactttcctggcttcgtgtttattgtgtacaaaggtggtgacattttgcaggtcaggaataccatagcttattttcatgtcttgttctttgcaatacctagctagcccggtgccagacaggccataggtggcggattagagaagggcttgctaagggaacacacggagcaaccccccagcaaacgccacagagggttctgtttacctctgtcgcgggcagggtggaaagcagtctcgcacagtgcttttgaatgttataaccataataacaaggttccccttttttctctgtccttagttttagaaggtactgagactgagtaaacaaccctctggatgtccaccgtgattttctgatgtctgtgatcctgaagtgtgtggtggtaggaaggagtgctggggtagactctggacttcagccttggcccctcagatctgtgtcctttttgttgagcagagcatgaatgttaaatatgttaaagcaagccgctgggacctggtgtttggtacatcatcacatcctgtctccccatcttccttgtcatcctttttcaattctcactgctcagttttaggcattgattttcagtctgtattgtttagtgacttggtagacattcatcagtcatttccctccttcaggtccgactagggcagagagaggcatgaggtttaagcacagtgctgagggataaagctgctttatcccctcgcgcttcagcctggggacactgatgtcacccgatggtcacatgcagcttttaccagggattgcctcatgcagcctgagctggcaggcctcctggctccaggcctgtgcatgaagcctttctctcctcttcttcctctcacccaccattcttcccaagacaccatgtaggctgagcctgtgtgtgccatgttgggcaggctgttcttaccgacttggaagctttaactgggagcagggagcttgcctttccctttaccctggtaccttgaaaagtgtctttcataggatggtgctattgggtatgggctctgtgggtcaagcacaaatcaaacaaaatattaatacacttttgtttgttatattaaaagcagacagtggtctgacagaaagtctgcgtatgaatactgcattgaattccacgtacatgatgtacagaccaatgaaaaatgttaaattttcaggtttgattgtttcttccaaaagagattttatagtactagtagtaagaacaataacaacaacaagtccttagaattcagttaattttttttctgtatatattcaaatttcagcatttagtggtgttgaacagaagatgggaaacattgaaatgtgccaggaggccaggtcatgcacaaattttgatttccatacgaagctaattgtagcttaaagactgcactgccattgagtgggctccgctgtcactacagtgtacaggaaggaatccttcgacgtaggatattgatgctttgtgaaatcaaagtaggccaaagggagatgaactaatgctagtctctactacattctaaacatgtggaggagacgttaggatttctataaaaatcactgtgagagttagtgacctatgaccaccggcagggcccagagctaagggacaatgaggctgagcatgggaggatatgcgatggagcatgggaggatatgcggtgggaggatatgcgatggagcatgggaggatatgggatgcagatgctgtgatttggtgtggtctgtgtctttgtggtctgcttgcgctttagagctgtggcacacaatgaattgtctgccacttggtatgttcaggactttgatctgaggcgccttctctactgaaaggagagcctgggttctgggtctctggatgcctctgggggtccgggttccttagttccacctgtctcccagcctcaggcctgcactatggaaccctgtgtagttttgtagattaaaaatacagggacaggctgctggtaacttgttctagtgtgacaactcatgcaagaacctcttctgtgtggcagagcaccaccctgctgtcctggactctgacatcaccttataagggacccttgacctctacattttgcctctgtttgtgacttgatatccctcatctctttcttgtctttttgatgaaactttgactacttcacaaagctcagctgcattctgctttgtagtcctagtctctttccagaaggtctgcagtatcatgttgtgttgcatgctgggaagggaaacatgcatcttaaagtaaaacagcttgtctgtgctgatagccaaatactctctttcaaaaatcacttattctttaattatgcacctgtgtgcacttgagcgtaggtgtaggtgccctccaagtcctgaggcatccgattccttggagctggagttacaaatccttgcaagctacctcgagtgagtgccgggaactgaagttgggctttctgcataagcagttcacactcctcactgccaagtcatctctctagccccactcttggtgctagagtttatctctcttaaaagactaccttgcagtcccttactaagtacagttgagaaccccttaccgaaaatatctgaggccaggttggggtcttcgggttttattgcatctgcatttataaaatgggccgcctcaaggtgtgggactctaaacaggacactgacacacagtctgcaggaatttaatacaggatttttacttgtgttttgacctgagaccaacacttgaggccagttgtctagtgcaccattagtacttacacagtttgttttagataatgaatgttcagccagaataaaatctagataaatgcttgtagctgatagccatttactacccatcaggctgtcttgccttcattaaactgaccgtgtgtatgccgtgtggtagaaaccacagtttgtgaaagaaaaggtttcttttgggaagcgaatgtaggcgtgcacggatagtgaggtgtgtgagctttgcacggtcagagctggggaactaaacagagtgttagtaactggactcaatgatggccgtgatgaggaagttcctgagagaagagcggaattgtttgcacagttcaaagtggactgctcttataagatgaaatgaggaaggctaagtgaggtgagatgcttcacagtgccagccaaactggctgcccggtggctgtgcagatcttgggctatggcttgccactgggctgtttctccctgccagctgctgtacacgggaaagccaggctctgtttagatttaagcgtgtggggcttttgtcagtgagttgtttgttgttcctggatctgaggtccctggggggcggggcaggggtcacactgaaggctgcattgccacactttgttgttgtttgatagtatggagattgacagtgcagattagaatatagagtgttacatggtatagagcgttatgtagtctagactgttgcgcagttctggtcttgctgttacagagcactatgcttctgttagcaaatgcagcaaatgtgatgagaagtcccatgttgtacatttctgtgagaagcattttatataacatgataaatatttctgtttctataacctgttaaatatttctgttaaagacttgctttccccgaagttgcagaggtgcacactgttggaagttcagattacagcacacatttttgaggtgaaccttggaaagattgagagttgtgtgtctggatgatgtggttggttctcctgctgtgtgtcgtagatgctgacagtgctcgtccctgacgcatatttcggagtagacagatagcactgatgagaccctgcaaagtgcctgcaggaatcaatttgtgtttatatttataaaatgatgctgaacttgtggctgtgagctgcgctcggcccagagccactaggctgctgttctcgagctgtccgtctttgaacttgggataaggactgccctcctctgtgggctcaaggatccatcaaaggcagttagggcttatgccccagtaaagggtaatttaaaggaaagaatgccctggagccacccgactcagaaagatacatctacaatgcatccatgagtcctctgcgcctccttgacttttgattagttgtacagtccctgtgaactgccccgctcaccccagtgctccctctgcacatggtccagcctccacatttgatgtgcctctggatgctggctggcactagacttgctgttgtgtgtgttttgaagctgtccagtgcttcgcttatctttctcccattttaggagccacttttctcacccacaattctagcttcacacagcaagaactgcctcgcactagcggcaaggcaagtattactggattccgtggtagcagagttgccaggaaggctgaaggactagaatagcaagaagggcagaatggagagatggcagaacctgttcggaggtacgcagcagggccactgtgccctagcctttctttgcctcctcttgtcctttccgagtctatgtaagagcatgcacgcctgacagtgggtattgctatgcacacacccaggcacattcctcgtgtttgagtttctttgtgtcacaggataagtcaaagggtgtgtcctacacttgtttgggtctcttggcagtagtgtgtggagtcctttctctaaggagcagacaaggaagaagagttagccgagtgccaagttagttcctggcttgtactaactaaggcatgaggaggcaggagggtgggtttctgggcgttctctggtgagctaaagcttagtgtcatgcgcttatctgcatagttgaccatttagagtgtgttctcgtggcacctgttactcagtgaggtgtatggcattgtcattttatccaggggaggtatggaaactgctgatcaaggaggagatatgttctaacaaaggcaggtagggctgggactcactccagcccctgactgctgagccctggggagctttcccagttgtgctggcctgtgcacctgtgcatgtcactgtgtccacactgccggcctgtgtacctgtgccctgtcactgtgtccacactgctggcctgtgtacctgtgcatgtcactgtgtccacactgctggcctgtgcacctgtgccctcacactgcatctacactgctggcctgtgtacctgtgcatgtcactgtgtctacactgctggcctgtgcacctgtgcatgtcactgtgtccatattgctggcctgtgtacctgtgcatgtcactgtgtccacactgctggcctgtgtacctgtgcatttcactgtgtccacactgctggcctgtgtacctgtgccctgtcactgtgtccacactgctggcctgtgtacctgtgcatgtcactgtgtccacactgccggcctgtgtacctgtgcatgtcactgtgtccacactgctagcctgtgcacctgtgccgtccaccatgtccaccatgtccacatgtccaccatgtccaccatgtccacactgtttagtgtggtatcccagggtcgggaaggtgccacagccatcctactgcacagaattacttcagaaaggacctggatgcgcagtctgagtcaggaaaagctaatttgatattttgtattcttgttctgtctacttgtgttgcttaatgttgtaacatgtctctggttgacagcagccatatgtcattcaaatggaacctgtactttggcattggcctgacactcactcagctgtggagcccagaaatgaaaattacagaaactgtatctattcattagaccagtggaactgataagcacttttgcggctctgccccacaactcttggttttggcaaatgaaagtacagtagattaagccccctgctcttttcccccactgagcactgtatatttgtttcacacttgcagattactgtaaaagccagatagatgagcactttaaaagattatagcaatggaaaatgtgttttgggaatgaactgcctcaaaacaagtattataagaggtgttctagtggattctttttcatatcacattaaacactctgcagacgtaacaattttattttttagagcattgcatggttttctgtttcaggagaaaagggcttatgccctattgtttttgtcaagccttatgccagctctcactgggagtcgagctatatccacatgctctgtgcatgtgagtatattgcagagggtttgtgtgtgcgcacgtgtgcgtgtgtgtgcacactctgtgttcttgtgctccacacttgctctttcacaggaaaatgaagtcagttctttcttgtctgagagagaagcaaaacaaaaattcaacagcccagatctcagccctctctgcagtagcagatggcaaactgtaatcaggggaggctcctgccagccctcagtttcagaagtctgtcccagtggggactgctggcttcggggagcccagatgcccctgagggggtatatgagctgtgagatcggccaggtggtaagagagcagcgggctgatgccgccaagaggaagaaaggagagaaatgagagtaaatgaagaggtgttttctaaggggcggggggcggggggtgagagaatgaggatttggaagtaggcatgtgtaagaagttagaaaatgggatgtagtaatggaaagagaaagaaaagtcttgagtgttgtgtgagagtgtccccaaggcttcttaccaggtctgtgtggggtcctgtactgatgcagtgctgtgtggaacaaggcttttgctgagtgctggtcaggctctgtgtcatagggtcacagtcatgggtcgtatcccagcctaatggctgcagcctttcagtgctgtgtacattaagaaatgtgtgtgattgtttaagacttaaataagttttgcataaggaggtatttgtggctttttgttgtttcaaaagttttatgctttcagtaagcatttgctaatgtagaataaaggaattgtttaaactaaagaccattttctcgaatttctaatgcagggtaacaggaggatcaggagacggttctgaaggaagcagggcttgctccgtacagattggaagagggtttctctaggacttccggctgtttgtcaggtggctgtgcacacgcatcctcacaggcagagggtagcctgggtgctcttgggaaagcaaacaagccccagccattcctttctacttacctgaaatagcaggccacactcctcccctcaggctggccttgaactgtggaatcctcctgcttccgcatcctgagtactagggttagaggttctactgtgtatagccacctcagctagattttgtttttcaattaaaaacgctttactttagggggtggaagatgtctctgtgggtgtttgttgaagaagggggatctgatttcagatctcttccacacacatttaaaaagcaagaggcaaaaactccaaaccgatgggggcacacatacctatagcccccagctcagttaaagttgtatttctgggtttacatagagtgtgtgtgtagtatcatgatgcccagtgttgcatgagccacgtgtggggatgagggcctgtcacctgcacttcctgggacacagaggtagcagtatcagaagttgaaggctatcctttggctgcatactgagtttgaggccagcttggcagtggacacccaccccttacttcaagcctgggagcttgttagttttctgagagccaggggccagggctcctccccactctaccacctttttgtcccactcttagccccagactgagccccagccaccccctgcagcttcatgttgcctacagggtacacacccacttgtataatacatattcaagtcatatctacacacacacacacacacacacacacacacacacacacacacacacacaccaacacataccctttgccctgtgaccagaaatcctgaaggtaatgatgtgcacgcctgtgtctctcctcccgttccctggctttcccttcaagaaggtcctgctgctgtctccatggctgttgtaaaatcagtgctttctgcatctccagctctgctcactagttacctcagagagaacagcctttgtaattgaatattccttgcacgtgaccccgtcatgcagctacaaggctgacattgcagcctcagcaaaggttatctcttgaaaattcccagaactcccctgtcggcacatccatgctggcagccaggtttaagtaaggaactgggaaagctctcaactcctccttctgtccatgtaactatgggatctctgccaggagggtaggtaggcacatggctccctgtagcaacccccccccagcnnnnnnnnnnnnnnnnnnnnnnnnnnnnnnnnnnnnnnnnnnnnnnnnnnnnnnnnnnnnnnnnnnnnnnnnnnnnnnnnnnnnnnnnnnnnnnnnnnnnnnnnnnnnnnnnnnnnnnnnnnnnnnnnnnnnnnnnnnnnnnnnnnnnnnnnnnnnnnnnncagcctgactccagaatcccctgctgtcttggttgtgcacagagtgttgttgttacaaggctttcacttggggttttcttaccaccccccccccccccccccaacacatacacacaaacatcctgctttatagattcagaagtatctatagaatgctggagtttgggcaataatataataaggaagctctccagtgagatgccttcagtcccagtacatgagctcatctgtgtgccctctgcagcctgcactttctcggatgcagaattcccaagtgcaggtggcacaggcccttctattttctggtcacctctgccgaggaggtgctgcttctgggagtgcttgcatagatcacctggagccctttctctctcagtccacttgatggcttccatgggagaaggctttgtggagccctgttcatgcattctcaagatgactgcccatgtttggggagggggagaatgtttgtaaaggactagcagaactgtccaagcttccccccagcatggctccttttactgtcacagtcttcttccagctgataaccctcagtggattaggaagattgtagactgctctcttctggctgtctcgtcaccagcaggccctctgagttggtaatgttgctttcctctgccatgccaacttcacataatgtttagagtaaaattctttaccctgtgttacactatacgtcatctctaaagcaggctcctcttccttttgtgccgtgttttatctgaaagcactccgtagagtttatagaccgagtgttaaatgtccttgatggatgcttgagaaggagctggggaagtgcatgtatgattagggcacttgaacataaaactacataagtatgtatgaacatacctgttcatacttatgaacatacattttcatacatatgtatgaacttaaaaccctaattatatacttgaatgttaattttatacacagtaaaacctgtttaacctgggttgtaatggaaagtgtttcaccaccagcgaaggtctgtgttttataaattatttttttttattagatattttcttcatttacatttcaaatgctatcccaaaagtcccctattcactcacccgccctgctcccctacccactcactcccacttcttggccctggcgttcccctgtactggggcatataaagtttgcaagaccaaggggcctctcttcccagtgatggccgactaggccatcttctgctacatatgcagctagagacacgagctctaggggtactggttagttcatattgttgttccacctatagggttgcagaccccttcagctccttgggtactttctctagctcccccattggggaccctgtgttccatccaatagatgactgtgagcatccacttctgtatttgccaggcactgtcaaagcctcacaggagacagctatatcagggtcctttcagcaaaatcttgctggaaaatgcaatagtatctgcgtttggtggctgattatggcatgggcccctgggtggagcagtctctggatggtccatcctttcgtcttagctccaaactttgtctctgtaactccttccatgggtgttttgttctattctagggaggaatgaagtatccacgtgttggtcttccttcttcttgatttttttgtgtttttcaaattgtatcttgggtattctatgtttctgggctaatatccgcttatcagtgagtgcatatctaatgacttcttttgtgattgggttacctcactaaggatgatatcctccagatacatccatttgcccaagaatttcataaattcattgtttttagtagctaagtagtactccattgtgtaaatgtaccacattttctgtatccattcctctgttgagggacatctgggttgtttccagcttctggctattataaataaggctgctatgaacatagtggaacatgtgttcttattaccagttggaacatctgggtatatgcccagtagaggtaaattggctgaccttcagcagaaggtggaccttgcacactggggtggtagcggagagactagaatgttggtggagggctctttaaaggtaacaaggaggtcaccccacttttgctttggagtcgttcatgctatttagcagctgtacagactggcccactggaagcacttgtcagtcaggagacagggctggagagagcaggagtctgctcagctaaggaaaggcattggcctttcttgtttgaccatacatttattaatcttaagttgcatgagagttagggcacactccatgaagcttgacagagttaattttatgaaaattagaaggttcaccactttgtaaaatggataacaatgttgtagaatcactgtcctaaagaggtagcatagactggaaatacaaatgagtgtaagaatctaaatcagttcatggataacagagtcatccatgaactgatcatttacttaatgagagtaaataaaggctgctctggacacatccctgactcctggaaatcgaggttaccagaggcactattgtttagttcccacagccataaagaacattcgctctgaagagcactggtctgtgatctgctaaggaggaagcagttggacctagaggaagctctgagagattctgttggccaggaagaacataaagaaaccaagcaatagaatgacacctgctctttcctgtttttatctgaaaaccttctattgagtgcgcctaaagtttactaacaaatttgccattaaaaaaggctgttgtagccggtggcacacgcctttaagcccagcacttgggaggcagaggcaggcagatttctgagtttgaggccagcctggtctacagagtgagttccaggacagccagggctataccgagaaaccctgtctctagaaaccctgtctcgaaaaaccaaaaaaacaaaaaagctgctgtaacaaaagaacttttcattgtttcacaaatcaaaatgtaaatctatgttactacaatgaaaagcctaaatttcttggtggggggtagaagggtgctggtttgctaaatcattctaaaaaacgtgtttgtttttgagtctgaataagcagcagtgtttgtggtgtaaggtgaacgtgctgggaaccagggcacagaagaggggatggaagagggggcagaagaggggacggggtctacaggggcctgaggcacctttgagctccagcgcacctccgccttctggatcaaaggcaaggccgtcctttgaccctgcaatgatcctggagccctggagtgcgttgccaactctttcttagccccagctcacttgccgccgcgccccacccccacctctgtgcgtgtgtgcttgtgtggtggttctgttcttgaagagaggtggagtaaggtggaacaaacttgacttgcgtgcatgtgtgcagcgtgcatgctgaacacagtgcttgtttgttgatggcttattttcaagtataaagaactagttggaggaagctctggagtagtttctctttagctgagtttgggacaggagcgggctctctctccctccctcttttaaataaaaacatagaggaaaaaaaagcacctgtgtccttgagtcttctcagttggggttggattaaaccgcttggaaggaaacacttgcccaggtgaaggcccttgccttcctgcagcctcctttagggtgggcttgttggcctcagcaccccctcagctgcttcagccctgcatcagctgacgtgctgaatgtcttgctgtttttctcttgcatgggaaatattctgtgaatttaaaagctagcagaattagcctcagctgagtggaacttaagtttttttgttttgttttgttttcctgtgggttttttttcaattgtgtagattttacctggaaggacctaaatctaatgaaaaacagattgcaatgatttctgctattaaaggtaaattgctacagtgtttgggtttttgttgttgttgttgactcttagcagacagcagttgtaaataatcagaaatgaattgcatttttttctagggccatgaaaaaggtttttacaggctacgggtttgataagagattgtagataagtaattcgttgtctgtatgcacctccacactttcgtattaaaacagcatgatttagttcttggaagcttgtttccctaagtcccgggtcaggtgcatggacagggctccttatgacgtctgtcgtgggaaccagtgtgcttagtggctctgtcaggttttgactccgtctccctgcagtgagtctgctgatgttggacagttggatttctgcatttccaacacgcagaattaaacgcccagctgtgcaaatgtttgcttagttggttcattttttttctttaagataaatacctagagacagaattcaaggaaaaaagatgttgcttctatacacactgtgacctagcttagagacttgcttttttatttgaatagaagtcataattatttcaatatgcccagttgctctgtatttttcttatgtcaagtaaaaacctgtgaaacaaccattaggcacctagcttgaatatgttaaatatgtgttttaaaataacttatgggttagtaaaagtgtgcaggctacagtttcgattccttttctctattagatgtagatgtgtagtctcataaaattttaaggtatgattattataatgcccagattttaagttatatacaattggatgagttttgacaaagtccaagtattcgtgaaacgattcacaaattaagaattttttaaaatcatttttagaaagctcttgtgccccttttagtttctcctgtcctgtggctgttagtgtggtttctgtgatgtgcttggacctcgtacataggtgcatggagtgtgcctgcatttagtattctactgtttctctttaaacctctctcttaaagtacagatgctgattgtacttcttagaaccaaaggatcgggtaagagcagtaggcgcaggcgcttttcaaagaatgagatcgcaccccgcacctgacttaaatgcccatgttcaaaagtgaactctgagtggatgacagacctaggtgtaagaaagaagcttcaggctaggaacgtcgtgaccctctggagaacacacaggagcactgtcatggccattaaagcagaggccacaacaacaaaatcaaaaactgaaaacttaccgggcaggtggaaggaaggaagcggcagaaccacagcaaaaaacgcgtttgcagtgcctgatgacacttaataccgccctacagccctcgggtgacacgcccacgcacatggcaaggggacaaagcatggggggaggtgtttcccagcggccactcagtaggtgaagtgacatgcccaacagcttgggtcaccagggaaagcacagtgagtggcgctcactaggatggctgttcccggggacaccgtgtacagcagcatgcagggcctaaggattcaaagcaagcgccatcagaggctctatcgtcactctggatgcacctgggcaaacggaatggggtttagatggatgcttttaaggccttgttcagaacagcaccatgcacaaacccactgatggggaacaacccaagcgtttctggataaacggccttgtatacgtccagtggcctttagaaccctgcccagagtgagataagccagcagagcctgcacagcagtgtgtggccacctgcatgagagaagcagccatgtccaggctcgcagagctgagtgttgagcagcagctgcaggggctggtgggggaagagcaggagtcgtggttgtgtggtgacctctgcagatggacatggacggcgtgctgcctggctttgtttctggtaacttgacacagctcgcatcgtttgagaagagagaacttggactgagaaaatgcctccctaagaatttcctgattaacgattgatgtggcagggcccagcccactgtggtcctgggttgtgttataaagcaagttgagtgagctgtggagagcaagccagcaagcggtgttcctgagtgtcctctgcttcagttcctgcctcaggttcctgtcctgacatcttcatgactgtaaaccacccctaacccctgttgcttttgttcccaatgttaatcccagcagtaagtagtaggcgagctaggacaggcctcgctgacagcagcttgaatgggcggagtgtcactgcacagccaactcctcagcatggaggtcttcagcagagcctagcatggaagagagggctgggtctgtgtgaactgaagagagctcactcctctcagagcacagtaatgagcttgtttccaggccagaggtgggaatgggtttgagcaaattgcgtttgttggtgatgggtgtggagcagtcttaagtcttctgtccgcttccaagttgtctttctgcaggaacagttctatatgaactgatgcggcgggtcgattcaggtgtgccaaggcaaggtgccctcagcggaagctgggcggtgtctcggctttagtgtgccggagcttccgggagctgggctgccacagttctgtctggtgtttcactgctgcttagggggcctttagcctggactcctgttagcttaggccaaggctctttgggagatcaaactgttcaccttagagctgatttcctgaggtgccttgaaggattggtatcttgtgtaggagacgcaggaaaagctggcctgagattttgcagcccttagggctcctgttagtggatgaggccacagagggcccctgccccacgctaatcctttccagagggctctaggaccctcctaggttccccagcttgagtgcgctgtccccatgtcccttccttttagggctgaaagggtattagttggaggcaagatttcgatcttaaagtgtagaattagaaatgtaagcctaagaacaagatcagaaccacatgaaaacaaacctttcatgcaactacagtgagaatatgagttttaccacatctatatccctcctccctcctcaagctccacccactcactaccacatctctatccctcctcccccctcaagctccacccactcactaccacatctatatccctcctccctcctcaagctccacccactcactaccacatctctatccctcctccctcctcaagctccacccactcactaccacatctatatccctcctcctcctcaagctccacccactcactaccacatctatatccctcctccctcctcaagctccacccactcactaccacatctctatccctcctccctcctcaagctccacccactcgtcgtcaccctttattctctctgccctttctttccctctgttctttttccactaggagtagaacccaggtcccatgcctgctgggtagacattcctgagatagacaccctctctgcctcattgatttcgtaaaggcctagattctaccctgcccttcacagagtgcggccggtggttccttttagatggatgcttttgtgctgttactgtttgtgagttcagaactaatacccaccacagacaaatggcctgatgccactgtaacctttgcttgctttttgggtttttttttttttttttttttgacttaacacagtatttttagttttgaaagatcttgaaatatgtgttttgacagtgttgtgtgttttatgccacctttccaactgtaatgtaaaacttagttgctttttcctgtttgccttgcatgccagttagagtgcttcttcctgacagttgggacaggacccgacagagccgcatagtaagtcagagctgcttgtatctggagacccgctgggtcttgaggtcagtgatggagaaggagaaggagaaccttgatggttcattcattttggaaatgagagaaaggtcagggtatggtgaagagaaacatggggaccagtgtcccctcgtgacacagattgagactcgtttcccttagagggataatttcctggagagaacacttgaggaaggggcatcacatcacctttaggcacaccttcctcctccaatagaatccttggaaacactcagcttttaaaagagaagttgttgttttcaaatgtagaagtgtcaaattgttgaaatagattctttttaaaagtcatgagaaaacactgggtcccagatattttctggagatttcccattagcctagtttgctgatactctttatcgagcagccatggatggaagcacagggcgtgtggttgcagtagtgactgaaggctagtgggttccagggttggtacgctgctgacttcccactggtagatggaatgaacctgaaggcagggctagtgctcactcagcacaggtgactgcgtttggcgagtttcaattgcacatgctgattctctgacccattgggcaacactccttcatcagataacttagctggcaggtcctctgccaagggcatggctttggtgtgggagcagatacacacacagcccaaggctgaccacattgttctcgtggtaaaatgagtcagtcaggcctggggacaaggattgtggtgaacttgcctgctctgtgccagggtgacacctaaggcagaagtgcccatggccccagatcttagcatgtgacacatggtactgtcagcctcgaatgcatgttagtctgatagtctttgttgatactaaatacaattacaacagtagagactgccaagactctgaagagcccacatgtactttgcagtatgttcctcatggatgtctctaggcctttgtcactttgtcacttctgccttagcgccacagaagtaatatactgaatgatagacaccagggctaaacaagtctgaggtggactggagggtagtactgagtacctggtggccaagtactgagagggtgggcgacagtgggctcctgggctcttggggtggtctgtttcataatagtggcatttcatttaataagtctgaaaaagcatttggtgggtgtttctaaactggtcaaaacaaagccagttaaccattaaagaattgagccttagttccagcagtaggcaattacttaccatattgaaaaaaattggttcttaaaagcagtgcttagggtaggtaatgttacgtgacagcttgtagtttgataaggagcatcagccttggtatgggcacctgcctagagtccagattggttgccagaatcagtgtgaaatctcgagggaccccagttttacagctgtatgtgcatgacaatgacacatgggccatccagtttgccttgcctggcagacagagcagccctctctcagagaacgtctccatgtgtgtgagagtcagagaacgtctccatatgtgtgtgagagtttccgtaagccacggagtccccgtgggagagctcagcgcctaggggagtcgctgtgttgtctgaggcttcctgacatctcagctccggcaggcacgttctcctcacctgccttagatcacacaaggttgccatgtgagtctgcattagttaccgaatcagacataggtgctggctgggagtgcgtgcaccttgtcctgcggtgtactgttccagcatgcggacttacgctctagggacattctttggcttgacttcattcaatgtgaaatatcaaactgtagaataaataaagcaaagatttcagcagtgctattaatttaaaaaaaaaaaaacttgcctgcttgtagcagcctacattctgtgtggtgaaaagcccgtttaaaacctatttgaccatactttcagtggtcatagcagggaggttttgaaccaacaattggcctggactgaaagagagagaaccattatcccctatgcactattctcctttgaatcgttgtgtgtgctgtgaactagtgcattgtcttagatggaaacgctttagtatcacttcttttccattgctcagtgtttttgtaaataatttggctcttcagtgtggatctggtcctccggtttctgaagtgtgtgggctcctggggccgaggttcctggagttctctcgtggaccatattgtggtatcattagcaggaggtcttcatctgcagcagcagagcacactcacagcctgggttttgtttttctttttctttcctgctctcctaattgggtggtggtggggcacaaaaagattatggaggggaaagaagcaaggaggacactgtcagggctgtaatcccgcatgaggagggccatcctctgggtgtgagtgagaggctgatttctgccggcttggtctagctctggtatttgtaatacaagttctttgtttttccctgctctatccactaagaaaactactctctactagatgttcatccttcaggaacacgtttagggaggtattatttggtatatgtgttggctttccattactatgacaggatccgaggtaatgctctcgagtgggaaagcagtttctttggctcccagttttgagggcacaggctagtcctgcagctctgggtccttgatgggcaacccctcatggtgggaacacgtgacacagagccttgttactgcatggacagcagcagtaatgagtgtgcctggggccaaggggctgccatgcccctacgatcacaaaggcttcccagtaggtccagtttcctacacttgacctctgaggtacatgcaagatcaagcggttttgtttggtggtaatggggtacactttctcttagcaaattattacgtgcaagtgctggcgtcaccctctgccatcatcttacaaacagggctggggtgatctgacccagaagcacacacaccatgccttgtatccaaccacagctttcccccagtctgtgaaggggttaccctgggctgtgtgaactcactgcagtttgcctgttgtgtggggatggaattaattcaccatctccttggctttcatagcaggagcattttaaatgtcagggtcagggaaggaaccccttgccactagacttttatgacttgatactgataaagtagcattttgatggcaatcccacatcaccattgacttcatgggtagcacgtaagcagaggcagaaagtccgtttgtctaatgaagacagaggtaaagtgtggaatcgagaacccttttcccatgatggcgtcaaagccatatttgagttgagttcccacacctcttcagttcctcatttgctctatgtaactttctgacagatgccaccgcagtacggacagcaagctgtgagtggctactgccagcaaggccagcagccatactacaaccagcagccgcagccctcgcacctcccgccccaggcacagtacctgcagccggcggcggcgcagtcccagcagaggtaccagccacagcaggtaagcgctgcccgcatgcatctgtgttctcctgcagggctgtgttcagaggctgctggcgccctgaacgtcctcctgccctttgagaggcactgtgggggttgaggtgcgttttcccctttggtgtttcaagacagagtttctccgtggaccatggctattctggacctcactgtggagcccaggctgtcctctaactctacccacaaggccctgcacttcccctcccttccctccttccctcatctccccactactgcagacattgaggactgggaagaccagctttcagtagctgcttctgttactgattggtggaaggcagcacaagtgtcagttcacttcacatttgtgttctcaaatctttccaaaggcctttccacctagagaggcctggtcaggaggggttgcaggtcatgtgacggtgtggtgctggttgccttttgacctttctagttaggacattaagtacctcagcatgggaacatggtcgccttggagtgttagtcttataaactataaacatggggtcccttcagctgtagaacaagggagacacaagcagagcggcagtgagctacagtaaacagttgctgggtctttcctgtcctgcctggctcctcccttctcttccctattttcaggaggggtctctggcctcgacctttgatcctcctcctgccactggtcccctgcgtgctggaactgtgtgctgccaccgcacacatggagtttctggttgaaattagactaattaatcacctgttttggaggcaggtatgctggctgagcaggtaaaggcacctgcctgagcccagtgattcgcactcatccccagggctcacatgatagaaggaaattagattctcaccatttgtcctctgacctccatgtgtgcacgcacacacaaatacatacatgtaatagaaatgcataagtatttgttattgggccatctattgtagtttacataattgaaaaaatagtataatatatattgtgtgtgtgtatacacacacacacacacacacacacacacacatgctgaagtgattcagtttcatttgctttagactgttgctcttgagtggagtgaccagttgggaggggctgagggtcttgtagtgagcgcagacatagcacatagctgctagaggtcctcccggaagcagcgcctctttcccagctcaggctgccctcggcactttctctgttgtggggtgggggtggtaatgagaacaagcaggtgctcacaggcccgctcacttgctaagggcttctttatggcacaaatagtcaaatatgtaagcatgtgtagtttctacatacaaagttttaatatttcttttagttatgtgtattgtgcgtgtacagctatgtatcttggagtgcttcgcccgtagcggagtcagctcctaccaagagctggagtttcaggtgattgtgagaccccttaggtgggtgctgggaactgactcagcaagtactcttaacagctgagccatctctccagcaccatggaactgaattctaccggagtgcattttaaagtgattttgggatttttacagtccattgccacatgactttgtgtattttaagaaggtgagcagccagtccagggtttgtggaagtggggtgtgcagcccttcagttatctagccctcaccagtgcgtgaacatttgaaagcacttcctatcagctccctttggtgagaatgactggcatctgggctgtgagagataaggcttttcgaggactttcagagccctattgaactcatcttgggtgggggtgcttggtcacttcatccagatactctagtgcagacagcctgttcatcttacgctcatgggcctaaatgaatctcagttgtaaaaacagtttgattaaggactcctgagtacctgtcatttcctcaggaccacgctccaaatttacttccttcatgaagtgttcactgatggcttccagaagatggcaattagtcacttcctatttttcatatttaaatattgacagcatgccacaggcagggccagttctaatgactgctctgttagttacttagtttatggtttccttttgcagttcttactgtatattgacttgaatgcagtgagatatatgataaaaactgtattttaaccacaatggctcaatataagaattattattttaaaaacattctgagtaaagccaaacttgtcaggactttttcttaggttttcttgtgtttgtttgttttttgagacagggtttttctgtgtagccctggctgtcctggaactggctttgtagaccaggctggcctcgaactcagagattctcctgcttttgcataccaaaatgctgggattagaggtgtgtgccactattgctcagctgagtatgtttaaagtttaatttgatatctaatacagtgactatcttaaaagggggggagaaaaacaagaaaagtttcttgccatcttagttactcctagccatgctaccacctatatcacactttgccaaataaccttacaattatagatacatatgtacacacacacacacacacacacacacacacacacacacaggaaattacaaagtatcatgtaactcctgccctcttttgtacagttgaagatgtactgtaagctgtgtgtattccctgttactctttcatgcacacacttaaatagattttctagagctactttcatttctttagagccttattgggttttataaatcacaatatatttagtcggttctttttaatgtcatttagatggtttctaggtgtttccaacagtgttgcccttataacttgtgtatgctgtttcttacatagacatgagtagggaggatctgtggggagttcttccatgcagctctctgtcagaggacgggactttgtcgtcttctagatggttttgccagatggtccactgtggagggcacctccttttgtacccaccacaagcaccttaccctgcctgtcttcagtgctaggcatggttttctgggagataaagctgtgggtctggatttgttagtgtttttcctgagctataaattcctatcttttaatcttgatttctttcatttcagttttaaaattgatttatgaaaattctgtgcattttggtgggctccccagaaatcatgaatatcgtgtgtgtgtgtgtgtgtgtgtgatcttgattgtaggaaccggggatggtgggactgaggaggtgactgatgggcagaggtggtgcctcaagcctgagggcgtgggcttagcctctcaggacccctgtggtagaagaagagaagctgcctccggaagttttccttgacctccacgcatttgttgtggtctactgtatgtatgtacacagaagagaaagaaacaagatgaccaggatgaaaagatggagagtgacaggccccaagtttgtgtgtggacaggagaccatcccagaagggccctggtgtgggtacggggtgcgggtgcgggtgcctgtttgaatctggcctcgggagttggatgaggcctgcccacaccaaaggctatttgcttgattcaagtcgccggttaaatggttggtttgatccagagaaattgtgcagctgcactttccgtcctccctggagaggtggcttctgtcacttgctcagttctctgatgtgtgctgtttgaattcactccgggctccattcttttctgtctggtttcctctatagtagtttttgtttgtttcttttgtttctgctgctgcttggtatgtgctaattgcacatcctcagtgttctttctggaattttctttcttatgttttgctgtgtaacacagactggcctggaacgtcctcttctccctttgctgggactgtaggcatgtcctaccatgcctagcctaaccctttttcgtttctttctgttttttttttttttttttcctccttaacaaatttgtctgtttctgttgctattgtaattgtgtgttttcttgctttatatatttttctctggaatagttagttcttcagtggaaagccaatcagaacagcgtgtgcagttgagcccagccatgaaaggccaggacatgtgactctgagtgtggcccactagattcttgtgctgtaggccagggaggatgctggcccacagaacccaaggagcatcttgggaaggaggttgttaatagtgctgggtgtggtgtgtaagagggattagggagtgagagtcagtcctcaaggccctggggaaaactgggtgatttgaaagtttcataattggcagggggagtaaagtgatatggcgttgacatggttagtgaggccaaagtaatggcagcactgtatgctgaaggagctgccctgcttccctgccgttctccaccccagctgcattgtgtcacctctcacttgactcttcaggcagctgatgctccctccactgtcagcagcactgccccaccagggagaacctcaggcctttcttcttttgttgctgttgtaaattgtattctttttaaaattatgtatgtgtgtctgtgtaagtgtgtgtgtatgtgtgtgtgaaagtgtgtgcctctgtgtgagtgaaagtgtatgttccgtgtgttaagtgtgcgtgtctgtgtgtatcaaagtttctgtgtatatatatgtgcgtttattgtgtgtgtatgtgtgtgtgtgaaagtgtgtatgtctctaggtgttttatgtgtctgtatatgtgtggaatatatgtgtgtgtgagtgtgtgcgtgagtgtgtgtgtgtgtatgtgtgtgatgagctcagtcctctgctgtctgttttctgggtgacaggtgcacactcttgtgagggctgtgcttttttcatgtcacttgattttcataggttttgtcatttaaaacatagttaattttttaaaatacagattatcttctgacttctttttttttcctttttgcaccgagcctttcccactgtgttgttggagggagctgacaggccaggcctcttagtcttgagtaaatgaaagtgtctgtgctgtgtgagcctctcttcttctgggagtgttaaaccagcctcaagataggctgtatacaggggtgtgtgtgtgtgtgtgtgtgtgtgtgtgtgtgcatgtgtgtgtgtgtgaaagtgtgtgtgtgtgcatgtgtgtgtgtgtgaaagtgtgcgtgtctttgtgtgcacagacacaattggttcggtttttctgacatctgtttgggtttctcacacaagtatttgtgagtgagattgagctgtaatgatcttttagaagagctggagtctgtggcacttagtaagtcacttgcagacttgtctctttcctatgtccctggaaaagtttgtggtgtttgaagtgaatggtctgtcctttgaatgttttgcagaagtgtccataaagccatagcaaatgatgatggatttcttaatttttatcctttgtttcattcttgagattttaacttgtgattctgtttttttttttgtatgtgattataagagttataaagtttttgtaaaattggttcacatgagtctggttatttcacttttaactgtattaaaataagttcacagtcctcgttagtatactcttgtcagacccagagctgaggcatttgagctgacattttttaacttttgtgttgacactaatgacttgtccatgttaatggctctgatggttctatcctgtgtgtgagtgccattgatcatgtccctcatctcctcctaacatcatcccttcccagtcttaaaaaccatttatcttctgcttctagctcatctagttaagaaaaatcatttttggtaaaagctttttcagagcatccttggtctttgtcttttccattaatatgtatgtgggtatgtatatacatgcctgtatatgtatgtgtgtgtgtgtacatatatgcatgtatgtgtgtgtgcatgtatgcatgtatgtgtgtgtacatgtatgcatgtatgtgggtatgtatatgcatgcctgtatatgtacgtgtgtacatgtatgcatgtatatatgcgtatacatgtatgcatgtatgtgggcatgtatatacatgcctgtgtgtgtgtgtgtgtgtgtacatgtatgtatgtatgtgtgcaccacatcactcacacatatgtattatgttttgctactcttctgatgttgtttcttttcgattttaggtgtatgtttatcgtctttggacccttttatctaagattaatgtatttcttctaatcactgcaccaggcagtttctccagctttgatgggcgttgtctttgtctcttatttctgaggattatctgaggatgagtctttgttttctgaaagtgtttttatgcagactagtaaggattctgagctggtttcctcagaaggagtatttagaaggtctttgcttggcctgttatctctaagtactgatcccttctgggtgctagccacccatgggtgctagccactggagccacgattcatccttccgattgtgaagtttctctcttagaaatgttgtgagcacgttcatgagcagaactgtacgacctgcacacagatgcacggatgctccctgcattccgtcaccattccacgcccatcactctccatcttggtctcatgcttccttggagtatcatggacacacgtgccatttctagatagtgacatcttctccaaggactaaattctccagcttgctatctcctaaactagacctgttgagatatcagccgtcatgtgtgtattttgtctgtgtggtttcaagcagaatgtagacaaggctagtccactgctgcgtccatcccttcttcctctgctgactttgtgccttgacttacggaaaactgggtcattgtcccacagagcgtctttgccggctgttttgtctgacatagctgaacacattctgttttctgcccactgtcagcaaggtccactggcttgaagagcagcacatatccatgattgccttaactcagccccgagtgtcccccctgctctcatcaagtggctgtgctgaatgccttttgtgtggctgcctgtggtggctctagctctcgcctttgcagtcactaccaactgaggcttggagacatgagaggcagaccagcctttcccctattcccctccatctttctcacctactacatctgtgagtgtaactcacaccttgggaaggctatgggttgtatatcctgggagcttataacatcacattaacataatgcttggttgtcccacaacagctaagccaagattgattagagggttcctgtagtatgtcctctgggaccactttaaataaaattctccttctgcggttttgcacaccacaggggcaagtgttaattttgaccagacaccctggtggtggtcagcctgtggctgctgattctcaaaggagctgtgccttttattcccctgcctctgctccaggcccacctcttccttctctgttgtgggtgtgtaccctactggtcaatggtccttcatggtctcctgctttttctccatgctgtcctcccacctaccagctcagacttctctcccttcctgccctggcccttgcacagtagccaggcagatgcgaactctggaatagaagtgagcttgtcctgtgggccggcaccctgtgctcttgagtgctgctacttgcattgaggccaaggatggcagaggtctcctctctgcagctcaggtgcttcagacaacagagtagccaatcgctctgcttgtttgttattatattgctgaaaactttataaacacaagtaatttagaaggatcacatttctctttatttttaaattaaaaactttcctgatttagtccaggttgacctcaaactgaggctcctcctgcctcacccacctgagtgccagacgttccactctgcctggtttaagttgctcattgtataaaatgaagcttttctaaccccccttttcattctaaagaatgttcgtagataaagaagctacttccagaatttgtttggttatgcaagagaacaacctctgtttttgacaataaacactgagatattgaatgataaccgagttatcatacctgtaactttcaagtggtacaaaatcacaattacatccatctacttgtctgtctctatatctggctacagaatgatggagcaatttaaaaaaagataactttgtagaatctgggtgtnnnnnnnnnnnnnnnnnnnntcagacaacagagtagccaatcgctctgcttgtttgttattatattgctgaaaactttataaacacaagtaatttagaaggatcacatttctctttatttttaaattaaaaactttcctgatttagtccaggttgacctcaaactgaggctcctcctgcctcacccacctgagtgccagacgttccactctgcctggtttaagttgctcattgtataaaatgaagcttttctaaccccccttttcattctaaagaatgttcgtagataaagaagctacttccagaatttcaaataagccagaacaatgtgccaagtctgcagtagaaatgaaagcgaagctgtagttaatgccgctgtgcagtaggcaagggctcagatgcagccattcgaagcctcctgcagggtttgatgttcatgagtggtctcgctggccttcacagcacaagtagagagctggcaggagccttgtgttgttagcatgtcttatgtttccagcaagaccatcaatatggtattctgtgctctgatggtgagacacgtggggtacagttctccacagcacagcacacaggcattagttagtacactgagtagtcttcctgggaatttagggcatcctgaaacatccacagaacactttgttcctctctgcaaatagagttggtctctagacttaaacagttagcttttgtgttggtatttgtagcttgtgtgttgggagggggtgggggggggttcaggcaggattgagtcagggccccacacatgcaaggcaagctttgtactaattggccgttttcctcatctgctttttactctttgtttttcagttgcccagtgtggccttgacctcactttggggcttaggtaagccttgaactttcagtcttgctgcttcagcctccaagtagcaagtctaggcctttgggcttggctgtgtttttaggttacgcgtgaatgctgggactttttgaggtagcgtgggctgtgatgtggatccgtggctactccagcttttcctgcacagcaccacaggcctcagtgcccttctgtggtagtagctcttcttcaccatctgtctgtgcatgtgatgtgtgatgtggatcagggttagcacactgccactgcagaggacagcctttggagactggcagccgtggtggcagccatttttcctggggacctttcgccagccctcatcgcacatctttacctttgtgacaagcagttgctcacctggcatcttgccattttcttagctttggggaaatcaagttcatagacagtttgccttacactgtaaaacattaacaatcaggccagtccctgtgtgtagctaaggatagcaggcattggcacacacttattatttccccagttaaagctgtgggagactgaaaactctgttaccagcaagggggccacagagtgagctcgggtgtcagggctagctcaaggcccaggcagcctgcctctatgtgagctggcagcacaagcagtcctcagggaagccagccaccgcagggaactgttctggggaacttactctttgaagtgttcaccagggagggacttggggagagggaccatggtggtggtgtatgcaaacagattgtctaactgcaaagagaagttgctccaaacactgtagaactgttgcaagtgccttctgtctgatcatgcattccgaattaacatgtaatacttcacaacactgtggcagggcagtggcgtagcagattaggggcttggcatgcctgtctgtcctgtaatggagggcttgggagtacctctggccagccctctgcatttccttcctccttaactagctggactcagtacatcttcataatctctggaaatcctctcagatgctctactcccttagaaacccactcctaaaccaggagcctccctgctcctatcctctcagagcaggaccaggaggaggcctggtggtcttttcacttctgatcactaaagataatccctgccgagactctgcacctcctcaggttacctcacttacccttcagtgttcacatcctaaaccttcatctcctaggccatgctgctatctagttcatggaggggtgagatgctgcagcccatagacacaaaggttgctgctgccctccatagtgcctcacaggagaccccaccctcccccatggcacacatatacctgcctttcccttctcttcctcaagcactgctttctctttctgttgcttctgtgggcgtcagaacacgctggcactcttctcacccgctatcttgtctttcctctatggcccattaccacttgaatttacctcactagataagacatttatttcactacttgctgaaacagctctctccgtgtggtttttgtgcctcttctgtttaaattggcaggtaaaattgtaagtatcatcccgtatagcaggatgctctgaaagtatgcagacattaggggtgactgaacccagctaattatggtgtgcactgctcacatgatttttgtggttggaatacttctaatccacttttagcagttttccttcacagtctattgttaaccacagtcaccttgtggcacagtgggtcccctgcatgcatttttccagtgtcctttgcccagtacctccatcccagcctaggttctgacaagcaggagtgtgttgtctgctctgtgtgcttcctccctggagtccacaccagcctggatcagatgctcagagagaggaggccccacccttccctgcagatgccattctttctgattgacctgtcagaagcatttgactgggcgagcatcctgtcctgtggcttcttactttcatcactgacctcctggctctcctgggacctcttggtcaccactccctctccactctggtttctctttctctcccttcctccaagtgttgaccttggtctggcctcagcttcggagcctttcatgtccccacggttcttcactgtatgtcttcggtgtcgtggtattgactatctagtgactgtcagatgtacctgtagatgggactctcctccctgcctgtccagctcctgccctggactgcaaagaagatgactcaaaaggttctgaagctaacataaaaccatgctctgggccaccactccttctgcagatctttgccttctggaactccttcccccaaataaatattctctttttcctggcagcttgaccagaaacttcagaaacaaaaacattatgtttgtcttgttgtgtgtgccaactcttgacaattgtgtgaaattcagagacctagaggcccgcctgtcctgcctgtagcactccagtgccgtcttccacttgcctctctgcctttctgctttggttttccctgagctgggtgctgcatggtttgcacagacctgtgtattagggttttggtattgcatgcacctccccagtaggaaatcagctttgtgggaggaaggactttgctttgtggttcttttatctctagtcctgaggtcagtgtctggcacaaaacagatagacagtaaacattttgaatattgttgctattttaattattggaagtatctttttacttttctggtgtgtagcaaactgattttttagtgttgaaaaataaaacatttgctgtggggcattaagattttgtgacagtttttgataaggcccttatggaggcagttcaaactggctttttcatattctgtgtgtgtgtgtgtgtgtgtgtgtgtatggggggggggcatgtatatgtgtgcattcaatcctgcctgtgggccaacagggtttgtcttccccaaatggaatgtcagggtacagaggagcattcttttagaaacttgtatttttttttttagattcctccttgatcggcttaaacaagttagaccctcccttagctcggctgtgtgtatcttttagcatgtactttccaatggctcagtagtgtccatgactctacgggcttgtgaccctgaagggcctgctgcattgttcaggagcacgcggaagaggtcctcttgcacacttgctggtctcttctgtgctgctggccttgaggctccgtgaaccccacattcccactgctcctcacaggggaggcctaggctctcttgtcttctcctgtagacaggtagatagctagcatagagcagcgagggactgtctgccaaacagtctgttgttcccttcgtttataaacaatctctattcctaaggccttaccaaacaaagaatttcaagtatgtccattcaaaggtggtttgcatcttagtttcccattgagtattagggacaactgtaactttacagttttttctctctttcttctttttattttaaaaagatttttaaaatatatatttattatatataagtatactgtgtgtctttagacactgcagaagagggcatcagatctcattataaatggttgtgagccaccgtgtggttgctgggatttgaactcaggacctctggaagatcagtcagtgctcttaactgctgagctatctcaagtttgtaggcgttgttgttgttgttgttgttgttgttgttattgttctgtgcccagtggccttctcatccatagctgtttgggggttcttggagtatgcagtgcagggcgtttcctgcctcccagacgcctcagcagactttccctccttcccctgctatctacagagtgaaatggaatgaaggagagggttattctatcgggttcttgagatgacaatgacaggaaagacagggctttatggtggaaaacgtggtcctccgtctctttgctgggacaggggcttctgatgcagcttcacctttaagacctagctagtaagcagcctcgcatgaccacaccctccctccatgcctctaacacctccattatcacagctgacaaaagccttcctctctgtcaagggttacaccaataatctcaccagtacagctgactcagggtcttatagtaggatgcatcattagaagtctgcagcagaaagcaatggggacattcagactttgcttttgtgggtatagtttatggttttcagtgtgacccagacactgaggaaaatatcaggtattttgaatgtgttctatttttttttcttttttcttttctttttttcttttcttaaagcttttactttgagtcttggaaaacttagaggtacacatggagaagacatgatcacagaatggagacagcccaggagcatcaatgcctgcagctaatgctggagcaggggtttgacaggatagtggggctagaggaatggacttagtattcctctctccctctcgccttccacacaatccacaccagcctcctcataatccttctctagggcagccatgttctcatgggcctcagagaactcctcttcctctatgccctcatccacataccagtgcacaaaggcacgcttggcatacatcagatcaaacttgtgatctaggcgagcccaggcctcagcaatggctgtggtgttgctcaccatgcacacagctctctggaccttggccaggtcaccaccgggtaccacagtgggaggctggtaattaatgccaaccttgaagccagtggggcaccagtccacaaactggatgctgcgcttggtctggatggtggcaatggcagcatcgacatttttgggaaccatatcaccatggtacagcaggcagcaagccatgtatttaccatggtgagcgtcacatttcaccatctggttggttggctcaaagcagacattggtgatctctgctacagaaagctgctcatggtaggctttctcagcagagatgacaggggcataagtggccagagggaagtgaatgcgagggtagggcactgggttggtctggaattttgtcagatcaatattcagggccccatcaaatttgctggaaacagtgatggaagacactgtttctggctagtaaggcggttaaggttggtgtaggttggaagcttgatgtcgaggtatctacaacagatgtcatagatggcctcattgtctaccatgaaggcacaatcagagtgctccagggtggtgtgggtggtgaggatggaattgtagggctcaaccacagcagtggaaacctggaaggggaggggggctgggtaaatggagaactccagcttggacttcttcctgtaatcaacagagagctgctccatcagcagggaggtgaacctagagtcagttccccgccaaagctctggaaaaccaagaagcgctggagacccatgcactggtcagccagcttgtgaatgctgtccaagacaaggtcaatgatctcctcaccaatagtatagtggccatgggcatggttattggcagcatcttccttgccttgctcagggtgaaggagctggcggcaggtgccaggatgaacttcagtaactatgcgttccagttctacaaacactgcccgggtcacatgcttgccagctcctgccacgctgaagaaggtatagaaggggtcatctcctccccagtggtcttgtcacttggcttctggccatcaggttagatgccatgttccaggcagtagagctcccagtaggcattgccgatctgaacaccagcctggccaacgtgggtggagatgcattcacgaatgatagcaatgggttagaaagcaagggtgatagaaggagacactgggtcttggttactgttcctgacagctaagagtccaggtaagtaacacaatgaggccttgaatgtgttcttaaggctatatatatttgtctttatctgtgtgttaacttcaggtcactgcagcaggtatgacccgtgataagagcaaaacatgtgagggtgtggctcagggttcctgtctgtgcttagtagggccttgcctgctactgtggggccccagtaatcaggagaggcgatggtagagtagcagacaagatgttttccagccatgcttctctgtgatagaatagggacatgtgctggttgaagtgtctctcggaaggtttccaggatcgagagtgtgtattggtgagagatgtggtctcagcaagggccatttatttatgttagtgaaagtggagggcagtctgctctcttcgtggtgctgcacttcagaacttcagtctcactaactaaacaacaaagaagacttttcttcctccctactcccctgagattaaagaattaagactattaaaaattttaaagtttttagttttagtttttatttatgaacgcccatgggggccagaagagggggtcagactccctggagctaaagttttcaggctattgcaacttagctgatgtgggtgctgggaactgaactcagctcctccaaacaagcagcaagctctcttactcactgagccccagctcctcccccagctccattgcaccatcctaacagtgggtcagtcgtttggtggttgagacagatggaagtctaagccttgtttaggtaagcttggagtatgtgaacaggtgttttaactatattttcttaaaacaaaacaagagttgaaacataacatagtatattgtaacaacatataacaattatctgtattaatatgcaaaatccataccaaatataaaaagattttgcttgttaatgttctttggtctaaaagtagattgagtaatctacccttttttcctatcatccctatacccccttttttatcttcatttcttcttccccctttcttcctaacactagataggagagaaagaaggatagaagaaagaaaaagaaatccctgaattcaacttctttattttgtatcatccctgcccaagaccattacaactttaaccaccccccttaaactatgacaaacatccatcatccattgagtgacccaaaaccacccccagctcttaggaatatgggcattgctttcttaaaattggggagagggagttggaggtcctaggaaacttgagatgttgattaagaaagctagctgtagcgtttgctgtcgagtctttgcaagctaagaaagttcagggcttaaatgaattcctgactggaacagtccgtgatgctggataacaaagctagccatttagaaattgtcctggtgcagaggtttgaggaaacagaattgagactatctcaggtaggattgagcaggatgctggaataaatgtgtctcagcatcccagcatctcagcctctcagcatcccagcatcccagcatcccagcatcccagcatcctttcactatccccaaggatgaatcttgtttaggcctctttaaattcattggtgtctataaacatataaactttcacaaagtaacatacatttctacaataacatatgtgatcaatgatcaattaaagatgacttcctgttctctgtttaagcaggtaaggcacctgtctttctttataagttagtatgtaccgtataaccaaactgtaatagaattttttatctatgtcaattgaaaggctggcataagtcctgagattgctgtagccaacataatgtattggctgtacatagatgaagtctggctggagacattttaatgtctcagccattctcggagctgttcgcatgtagaagaatcaacaataccaggtacatgttttgttgttcttgatgtctttcatatctgcagtcaggatcttcagggagtcttcacctgtcaaatccccatgtcaaagcatttcttttcctgtggaaataaatacaaaacctcttccctagtgtggcacacatccttccattctcaggtcaggacatccttagtaaaatggctgatttagtgtagcaggcttttccataatccagggtctctcagtagctgttgggttttgttcattagcattcaaaagctttgaagttaatgaggcactgtgtaatctatctctgggagatcccgtctccttcttctcttctgtgagcattgcctttaacgtgttgttagatcctttataactgtgggattgttgagaaatatctgtaacatgttctatgagtaatgtctaaaatattgttgcattgtaatggatacatatgtcagagcatcatcagcgccatctgccaaggcatctcagatggaccatctcttaataaatgtgtcatctcagaatcagcgttttcagaatttaaggcaaaagccacttggaattctgaacatgtatcaactgtatgatgtattaacacatatttctccagagtctataaaatgaaacctaatctattgtatgacattgctctaaggtagcatcatttagcagaatctggatttataattcacaatattgcatctctatgggctgccattctaattccttaagccattgtggatttttttcatctatagttatttcgaagataatttaatggtttcacatcagcatttgtgacctttattgtcaaagttagtagttaacctctacattttggagtgtactggattataatttgataatactgtatttccatgtttaacattttcaaaagattttatttctttttagaatgaggatcaaaagggaaatccaatcagagactgagtaatgacatagtaatgtctgcttgaacacttaatttccttcagaaaggtgggagagggtgggttcctgcctggactctgtaggctggagcactggagtgtgctctgggctggagtgtctcccaggcctcccatgagcatctgctttgtagagtgctgggtctgttggaaaagtggggagagcctgaggaggggcacagtcatcaaagcccttgtattttatggccttctcttctcttgatgcttatatgctgaggcgagaaaattggggttcccccatttttcttttcactacttttagcagttttcatttgaatttaaagtgctcattttagtatgttagagtttgaaaaggagactcaatttagagacaaataagtgactgattcagtagttccagtttcaggatcccagtaccctctttgaggctataactcattatagagacccattgccctctctctgctggcctccatggctaccaggcaaaacagacaagcatgtatgtaggcaaaacaccgcacacagaaaagtaacgaacaaactaaaagttcttccttctcagtcattttgatgaaagacagttctgtagagtagcaagctgtgcatgtattgtttcagttgaagcaaattcataaatgctcacaacagtaccattactgggctttcctagtgtaggttatggtccccaccaccacaaccaccacacatactaaaggggataacaacaggactaactcatttgcagactgattttcccccaaaacttggagtatgaggtggggactctgttcattctctggattaacttggtgaaagcagtaggaggcagagagtccgttggacaggcgacagtaaggattcataaaacgcagagggagggaagggccattgacatgagaactgttgacagcgggggatttacttagcaagttctctatcccagctgtagtctgtggaggactttagtgtcagtctttagctctactagaaatcagagtgtacatccaagtttgagagcctctcctgtacacagctaactggtgccttccagtcatggaacacagttccggtacggtaatctgttcctgtaacactgggacgccacactgaggcaatgcctggagttcggattgactgcagctgtgctttaatctaatgggctccccgtctctctcattgctatttatactgtggagacacattgtgctccagagatgggcagatggtcaagcctagaggccatcggtgacagtctttccctttgcttccagatctggtgtttagagcacagattgttggacacccactcttggaggttctgattcaataatttggggcatgacctaataattttcctatctgtaaaattccccagtgagaaccctccttgggaaccactgtagactaccctagattttgaagtaacttgttaaattcccggaccacaggatgggaattctgacagttctgatgtagcaaggacctcaggactctggacttgactattttactagttgccaagtatgttggatatatccttgcttcacaacagtgattctcatatttaattaaatgtaattcatggtaaatctcacattgctagacatttctccttttacccaagtagaaatttagttcttttaactataggaacccttagacagaatatgaacacacacacacacacacagagagacagagacgagagagagagagagagagagagagagagagagagagagagagagagagagaaaacaatccttaagcaagctagactttctgttaattcttacaagtgatgtatatggcctagcttccacagatcagtaaagatgagggtgcctggatccaagttctcttcagtgtgatttttttttttaaaaaaccctctcacattcttttcttttctcctcctcctcatcannnnnnnnnnnnnnnnnnnnnnnnnnnnnnnnnnnnnnnnnnnnnnnnnnnnnnnnnnnnnnnnnnnnnnnnnnnnnnnnnnnnnnnnnnnnnnnnnnnnnnnnnnnnnnnnnnnnnnnnnnnnnnnnnnnnnnnnnnnnnnnnnnnnnnnnnnnnnnnnnnnnnnnnnnnnnnnnnnnnnnnnnnnnnnnnnnnnnnnnnnnnnnnnnnnnnnnnnnnnnnnnnnnnnnnnnnnnnnnnnnnnnnnnnnnnnnnnnnnnnnnnnnnnnnnnnnnnnnnnnnnnnnnnnnnnnnnnnnnnnnnnnnnnnnnnnnnnnnnnnnnnnnnnnnnnncacaggctccgttccaacattcctttaaagggcccagttattatcacacgcctggtaaacactcaccaggatctgttttgtgtcttaatttggagagattttggtgtgaggagacccagcagtacaagactttttctcttgcttcttcttcttggtcctctgtctagtttccttcagttcctcagtcttactcaggaacacagtctacctcatctgagaatctctttcatagtaggctggcctggctggttcgagggcaacctccacatcctttctcaccagctggcctcataatttttgtaatgtttctcttactggaatctggggctcacagattaggccgtgctgactgccagggacactctgggagccacctcccatgtctgggattgcaggaatgcatcaccacagccagctctgaagtgggtgctagggactgaactcaggtcctcatgcaaggcaagtatgtcaccagtggagtcttcccatgtcacctttttggttcttgtagcttttactccgtcagcatttctgaggagtcagacaacttttacagatggcactgtgcaattcttagaaattagttggaaagcctgcagttctctctccttggcaaacaaaggttctgtttatgtagtctgtgggtttcatccattttcttagagtaggttgctatcaggctcttacgtgcctcatagtagtcctctaattaagcacgtgcgcaatgacaaggtgttcagtggagacagctattcagactagagttaatcgggagctagagctactactgtgcatttaaatcagacactaacagtgtttgaggagtccttagtaattttatttttatttccgttattttataaagattataatgttaagttcagttattcataatcaatctgcttttataaatctcagggaaattatatgctttttctgatgaattcgcctgttgatactatgttgatagttttccccagtaaaccggtttgaggatctgataaagtctgtaactcctaaccctgtgaccatataaggtgccatacaaaatcagctccaacttcagggtagggttcagtgtcatttgctccaaagtcaggaatgtaggcctttggtgaaggccacagcgtcctctgggagggagggcctcgcctgtctactgagtgcagccctgctgggtgtgtccccttaggtgctgtgcatggagcaggaggaatgtggacaattttttcttgccaccacttcttatgtgttatgatgtagctatttatgtagcattgatattgcattaggtattttgagcaatccacatgactacaggaaaggtccttaggttctcagcaagtatgacagcaatttatagaagacgtttgaatgcccatgtgtcactggtgttaggacctgtattttgtagaccctgagaaacagcctctcggatctatctcatgggtcagtgtgaaggccaattcactgaaggaataaaatgaccagaaacttcctggcacacgaggagtgtgacagcacatcaacatcatggctatgagtcgtgtcctagctgatgaattaatatttcgattctaattcttcagtcagttttaaatttaaaaagataatcgacactaactggatagttagcttttgccaagcagagtgccaggctttatagatgaagaaaatattttttggggggtagcaaatttggatgctgtgtaaatattaacatgggctacctttccctgttgggtacccagagaaggaaggactacagctttgtgagttttttgtttgtttgtttgtttttgtttttaaatgagttgattattaaaaacctggaatgctgccaggtggtggaggttgaggcaaggtggatggatatctgtgagttcaaggccagcctggtctgcagaatgagttcaaagccagtcagggctacacagagaaaccctgtctcagaaaaccaaaaccaaccaatcaaccaagcacacactgcttgctagttgctttggtcctcccagtcctcagctcccgagctgcctctgggcagagaatgtgactttaggcctccacatgctcccttctcactcagacactgctgtttccggaaggcatggacgaggcaccagctcgcagtgctgtcagcctccgggtctcaccctctccacaggtctcacggacagatgtcccctcagcctgtccagtagtcagctgccacttgctgatggcagatgtctgtgtgagaacgccactgtgaatattattgaaactcatcaggaagaagcactgtgggccacactggcctgcctacctttcctcgtgggtatctaaatctggaaaagaattgttcccttgaattcagagaaactaactagtgtttggagcacatatcctttgaattcattgatatgcatgtgtacatgtgttagtgtgtgtgtaaaaacatcaatacttttatatatcatttttaagagaacatggttttaactgaagctaaaaattggactggctttaggatcagtaaaaatccattgggctttctttggtcatgcgatctttctatgagctagaggaattttggagcaggatacatggaagaattcagtgacaaacaggagacatgactgagctactcagcattgcccacttaggtggtctccattcatctacatcctacatcttgtattttcttagtccatccttcccccatcttcctccctgaactgaacccagggctcatacattgtaattctgttacactctagcccatcctgttgtctgaaaataaactccaaacaccttttagaaagattttttatttttatcttatgtccttgagacacatttgtgtatgtctaccatgtgcaagcccgatgctcacagagtcacaggtaggtagttagaagctgccatggctgcttagaactgaacccagttctatgcaaaatcagccagtgcttttaatggctgaaccaacaactctgcagccgccggccaatagtttttacattgtacatttctggttatttccctctgcctctttcgcccttctttttttcttgttttgttatgtcctcctcaattggaggagctgagtcatgtgattcccagtgtgagatattccgtttgagtccctcagcttgttcctcagacctttcaatttgttattaaaacatcattgttgtgtgtctgatgtgtttgtgatctgtggcgtgaatgtggtagagatcacacgtagagatcggagtatagctttgtggagtctgctctctctgtgggtttcagggatggaacttaagtcattactcttcagaacaagttactttaaccgctaaaccatgccaatggcccatctaaagcataattaaaatgaaaaggttgatagtttgatctaatgagttagtaggttctttgcaggctttgattgttgctttgtagacttggggacctggtgtccttcagggccgccattgctgatctctgcagtcttcttcctcggcttccagtttatttttagtacatcttttcacggtcgtcttttttctttaatacagtagcagacagcaaactgtgtctagtagcacgttgctcctaggcagtgtagctgctaacgggatgtgtattcctggacatgagccaagttgtgcttcactctgtgtgtttgtcctcatgctctttattttggtgttggggtgtgagccccaagaacccatgccagccacttacctggctgctgctcgttatgctgggctctgggaatccaggaggacagcagccttctcctgaggaaatcgttactgtgggagagccagttctgttgatggcccacgtgaactgtctcggtgttttggaaatcctttcagcaggattctgtgggcagcatagacatccccctggatgcaggatgcaggatggagagatctggggtttagaggtggagggagcagccctttgaggcccagtgagaccaggacttgtaagggataatgttgaacacagctattgggggtcagctacctgagggcatgaagaactgttttccacacaccatggatgctgtttccataggaacaaggaagcatttccagaattatcacattgaatattctataggccttgaagtgggcatgaggccgtaatatagggtgcccaatagacaggggctctagctagcaagatgaaggatgaacaagatatgtgttggggttgaggtatatgaggtgtgcatggtcacaggggaattaaccgatgtgtaagctgcctaagacccagttgggaggtaaggcctgaagtagaaggagcagatagaggcttccaagtcatatgtggacatggagggtgaacttccctatgtgtttccatgttaaaggagagaagtggatggttggtcagtgtgggctcagtgtgggcacttggaacaaaaggtggagggaccagcttgaagtcactggcctctgtgcctggcttccctcaggccttagctacgtaatgatggaagagagagaaggcttcaccatgcagcagtctttaagctctctgtttctgcaatcagctgtagaaagttcctgcccatcactttagagactgcagcacatgagtgcatatgagggccataaaggagctgtcctatagaaggagggtgttgcaaagcctcttaggaaggtcagcttcccttggtgctgtttcctgtagcggctccctagggtggtgaggggtgtgtgccctttgggaaagaataccttcaatttctttatctggaaacgtgaagtttcttcacagggctcatctcccaggacctgcggtctgccctgggcctgtggagtgtcttcactgccccagtgagatgccataggccaaggagattggtttaactggtggtggcagtttctaaagtagggagacagaggaagcaagagattctggccagggtgacacaggaattaggaagctgctcatttttcctgcactcagaatgttaaagagacagtccccctcccgctgtgcgcgtgggcaacccttgtcccatcatggggcatctccaggtcctccttctcacccccaccccacctcccaaattgctttatgtttcttttcttttcttttcttttcttttcttttcttttctttgtttttgtttttgttctgttttgtgtagccctggctgtcctggaactcactttgtagaccaggctggcctcgaactcagaaatccgccggcctctgcctcccaagtgctgggattaaaggcgtgcaccaccaccgcccggctgctttatgtttccattcctggctctccattgagccgtgaaacctacaggctgctctttgagtgtgtccctgtccatctcctgctgagtcctgtgttgttgtgactgctctcctcctcctcctcctcctcctccatatcccattccctttggtttatagtctgtattcattgttttggtgatggtgccggggcagtacctctctctccactgtgctaacttggctactttttatattgcgttagatattgtaacgctagcataaacatcttgttcctgttgttccataatgatggactggagtgtaaattgccacttcctttgttaagagcactttgctagcatctgtcagtgttcatcctatcaggcctgtgatggattcccactagtggagaatagtgctattgggatatttcacatgaaatatatatgcatagagttgcttactgtaatgctgtaggaagcaaagccgggaaacaacatgaatgtacatcagtatgggtactgtgaagggactgaaagccggctcatctacagaaagcattttccagctgtaaataaagggaaaataatgtaaacgttcaacttgtaatttgtacccagcgaacaactaaggagagatggattattttaaaacataagaagtgtagtacccccgtggaggaaggggaactaggaaggacgccatcttttactcttcatctctatcttttgaaccactccggcttccttccctcccctacaggccttttctttcccagagctagaaaacaagtggcttatgtcctagatcctcattttagcttttccttcactcttttcattgattgtgtggtttcacatgcatccccagtcctgctcggctcctcgatcaccctctgccttctgcccttgcaacctcctccccaaaagcaataaaagataatgccaatatcaatgcctatgcaaacaaacaagcaaacaaacaaaacacaaaacatagaaaacacttcattgtggaagctgtactggtgtcacagtgtgtcccccagtactgcagtgtgtcacagtgtgtccccctctgtacacacatcttcacttgcaaatgttcattgtgatgagttattggtctggcttctgtgacagcatcaatattggatcttccctgggcttcctctgggttctgctgttgctgccctggggcatggagatcctgcagctttgaatcagtaggactggcccttccatgcatcccaacctcttgaagatgatagagattttggggttgccaacacagagccctggatctgggcctgggtggtagttgagctggtcagcatgttggttcttccttatccacagggtgggcactcaagcattgactggtctggctaggccacccagtgccaccattggcaggaggcaggtcagctcttccaactacggggtggaggaatcgcctctgcacctaacccatctcacagcagataagtgaggagtggctgggccagctccactgcactctccactgagacttaaagtaagctggggtcctgctgtgttcagctgaccttgcctcatgttataatatgacagtgtccccaacaaatggagtggtccatctcacgcattcagtcatggactccgattatcagatactcaaaggttctgagtctgtgtcgttggccctgtccatccatgttgtatgtaagcttccagctatttctgattcattatctgaagatgcttcagaacccatcttttgttacgtctgtaggtgggaggagggagcattcagacatcacagaccacattcctgcacttggttcttgtgtactgtggaattgtcgtgagacatttgtttttgaagagccttgactttttatgtggttggcagataaatttattgagtgttcatatgtatatactgccttagaattataaagatggcaatgatttttttcaaatataaatctgtgcttttaaaaatatatgaaatataatgctaaatgtattttcctgatattggcattaccttttattgcttattgagttatgtttagttacttgaggtaacaagtgcttgctgaagagtagcaacagtttagtgaattaagggatagacagacagggccttgctgtgtagtagccctgtctgtctgcttttgaactcacaatcctcttgcctcagcttctgtctttattatggtccctctgcatatgatcttttccttttcatttaacttttattgattctttctgaatttcatgtcatgcaccccagttccctcctctgcctgtcccttcccacccccaccccctttgctcttgcaacctccctgccaagctgtgactgtcacagtgtgttctgcacttccttacatctgcacaggatctttaggagagggctgtcgcccacagttcagtcagcccttacagtcaaacaccacctgcggcagaacaaactctgttcagccaatctcatgaaattggatttttattttattcccaactgtatttagtttctgtggttagaaatagtagttgaaattgtggtggaatctgatggttttgaccatttaaagccttaagagtgacttgcaaggctatggtgtttctgacggtgtttggctgtggcttcctggctgcttgttttataggcacttttgtagttgaagaagggtgggctcccaggcactctgcactctgctgtgggagcagggctttctcattttcttgcccagtgtcaggcaaccctgcacctctctgctgtctctggggcagggtggaggaccttgaatgccgcctcttgccccacttgatttgaaattctggctgctgctctcagggaactttggggcatatagcagggcacacttcgacaagcagaaatctgatttgtgtgtgtggggggagggattaaggtgataataatctaccaactcctactcagcccccacaaaccaaagtgtcaccctcagcaagcagccggattgtagagctgtggctgtggtggttgggtggcaggtgtcactcccacctcctcatgatgtggctcccaggtaaacccaggcaaccacaggggagccagtctggaagggtgggtattagataccacacgaacagactaagggcctggcttgctacagcttcttagttttgttggagatctttctaagagtctgtggaatgctgttctcgggcattcacctttatcttagagccagtttaaagacagcttgcactgacccttggctggtgctggctggtgaaatccagtttgtgtagctcatagatttttcagtaccagctcttggcttaagaagcccaagaatttgtagtgtgttctgtgtgagaatggggtggggcaggtgcttcttagagaattttactaataaacactaatttccatgtactagttaataaactaaaactagtatatggttctttagggcctatgtgagctgcctgagagagggagaacattttacttggtggtaggagtttcccattctttttatttcccctctcccattagaaactggttcttcagctttcagagccaagtaagaagctatgcactaggctcttagcctctggcctctctttggctccagtgagcatgtattaagtagccaagacctgctatgtagggtctgtgaggtggagcagcatttggactgtgtgctgtttcaacagaataccagacctcgcagcctggagagagttgaaggaaaggcaaggctgagtttctcagctctggcaggcaggcaggcaggcaggcaggtgttttgtattttgtccctccacccccactggcttttgttctttaatgtggttttctaaagatgacaccacataggcttgtgggattttccgcacctgggtgttggttggttttctaaaaactcataccgttctgtgggtattgaggagggcattttaagattcagctattaataatgtcattaattattttttaaaattgaaataatatttgaccaaaatcatagttcagctatacaaatgtgtggctcacccctgtaatcccagcacttggaagggtgagctaggaggattataacaaattcaaggccagcctgggctagcactgagacggtccccacacgttggaataattaagcaatatatcccagtttaggattaggtaatacagtgagctttggctttggtttgccctgcatggtgacaactcatttctggtccacaaaactgcagtcccatgatgcagtctcatatccaatgtgcctgctcttatttatttctgtcattgattcatcactgtttgtgcttttgataaagtattaaatgacagctgccacatgtttaattgttggcaaaaatgtaacgtcacttgatatttaatcatggtcagctcttgtttcattttgtctactgtatgaagcctaacacttggagatactgatgaaggattgtgtgtttgtgtttgtctaggacatgtctcaagaaggctatggaactagatctcagcctcctctggcccctggaaaatccaaccatgaagacttgaatttaattcaacaggaaagaccatcgagtctaccagtaagacattactatgctgattggaaaatgtaatgggttaaaggattctgcaaacgattgttttgcctgctctgttttatattacacacaggagagaactttctaagtgtcagatttatttaagaactgttagctgttaggattctttcttgagagccaacactaagctctgagcaaagctaccttggcagtgtccacttctgtagctctcagtcatccagctctccttgctgctgtgtgggtttagatgtactgggatatcaattattgacgaagcttggcatatagcatgtaatgtaaaaattatcctgaagctctccctctgttaggacattagcatttgagtatactctagttttctttgctcatgaagcatgcgtgccaggaaaagacaggctggaaggtctgttacagcaaaccctgtagagtatatactctgttattttgcagatcttgggtgtatctcaatttgtagtgtggtgaagtgcactggcccctgagtgttctgcagacctgtttctcgtaacactcgccaatgctttcatcacagttgctatggttaccttgactccttggtttagaccctgatccttttatataaaacgttttttaaaacccaccactggtttctagctgttcatgttatcacttggggattgttctcaggggattgaattggcctcaagaaagtctgtgtcctttctaggctaatgacaccagctgatggtgtaggtatgacacctacattggcagaacttgtcattctcaaaaccattttgttttcttcacatgtgctttcccatggtggtcttgagtttctagagaagaagtggacaatctgaacagttaggcaaacagtagctcgagggttcttttcttagtaatatacacttttgcttgtgaaaaagtgactgacaaacactaatcattgtaacttgagccacttgaatgcagaatgcatgttcttagtaaaatactaatgagtgtataaaagggagtaattgaaaaaaaaagaaggctctccttttttcttcttcaaaaaaccaatgtctgtcttcttagacgtggagagagccatctctgtgctccagattggaaagagccactttgttgaacctgtccccaaaccccaggtagatgggggtcacagttctttctgcttatccaagctcactgtgcctgccctgctctgatagtacttgggaggaggcacagtggtgggcactggggtagatttgtaaattggctattttggaagttccctcacgtcattaaaacccgattcctgaccccatcttcctcaagcagaaaagtcgggagattgacgtgcaaagagttggattttccacagtcagctaaacagtgctgtgtccctctgtggagttgccctttttgaagggagtggggtactcaaggctgatagttcttacagtagcgggtcttaaaccggacagtagatgccttacagagaatgctgaatacctgttattatccaaaaatacaccttagggataaagtatcagcctgaaagtcctgcctttaaggaaagagtctggtttgtctgtgttcactttagtctttgataacatcagctgttattaggggctgtgcgttttgaaaacgagaacattgctgttaggctaatggtgcagtgcagttaaaatccatgaatttaatactatggttcctttgatgattggaaaccagtgagggaacacagagaagcagtcacttagctgggtcctgatttcctagttttcagcgcagccctaagcctatctcaacctgttggcaggtttctgcagaatttaagtctaccagacgaatggctgctgggtgaactctttggaaagttttttgtttgtagcttgaacttgatttaaatggttgtcatgaaaaggttaagagtgtagctgtcttacattgattgatccttctcaaatcattttaaatgctttaaaaaattacaagttaatgaaagagaaatcttatgtgtcttcacatagctctgagagttcaggcatggttacttcttgttagcagtttgcttagtgttcctaagtgtcagtagccttacactgtcagcagggttacagagttccaggggaggcactgtacagggtgggggctccccagggtaggtggggtcccctaggcagtgtgccctgtgggtggttcctctgccattgtaacttttgcagaaattagccatcattgggccaatttcaaactaaagatatgaacatagttttgatgtcctgggaaactggaaaagggacacatggctttttgtgttttacaatgtaatgttcttactggagaggctaatgtgccacccagacatcgcattccctcagaccgggagagcaggaagagacaccatgactgtccttcctggggtccccatggccctgttggtcatgtcagagcgagaagatagagctgagcaaggcggcaagtgtttgtctcctttcttccaaaacagcatcccacttaaatatggattctgtaaatgaaaattcagttaagacttgaacagtttagacttcttccatgaaaagaaaagcctaaatacaatggaaagcttgaataagggaatattttaaaagaactgtagcctgcttttaaagcactaaaatgcttgtgcacccagtgtttcctgactgacttcttcagtctggtaaaataaatggaaatttctttacctttaactttatttacttggttagtttgggaaagcacccagagccttgtgctcactctgctgtctgttacctaaattcacttccccaaagtagggaggttcaaactcggtgtagccaaggcatttgcttagggacagctcattgactttcaaaaacttgtttcaattttaaaaacagatttctaactaagtttactttctgcaaactttctcatctaacattctgaagatttccgtttaacatgtgggggaaatgaatttcagcccattctgtagggctgtcaattagttcttgaaaagttaacggaggactatgggaatgctgtaaaaatagactggccaagccagaggcttcgaagggctgggacataactgatttgcaggatattggttttgataatagaaggatagtgatgatctatagttgataaatgaagctcattaagtaagggatgataaatgcatacactcctgattaatagaaacatctgcgcacaagatctactctgcttacggctctctgctgacctgggtggggccctggagcctttctgtggcttgacctagctgtccaggatgcaggcatgtcccagagtcacccccacagccctaagccactgtgcctgacatcttctctgaccggcgggtgagttggggatgggaggcagaggaggcagagcaggaacttgagccatcaaccagcctgaagatgaggtggcaggcaggtctctgtgttctgagcatgtgcccagagcctgaacttgagcaggtatgcagagcctcaggacacattacagtggttattttccttccttgtatgaggatctgtgattctcaggacctatcacaccctttcctgctgtcttggttttggccgtggtacccacagggcgagtgccacaccctcgccctgcctccaggccgggtgatgttgtccagtgggacagcaagggtgcttggcttcgtattatcctactttactgggaaatggctctcactttacagattgtcactttgcaggtgatgagaaggcacacatctgtttgctgtaacagggacatgtgaccagcaggcactcacactagcatccgtgcactggttactagtatttatgtttttttggatctagaagtaactattcttaatattaactgtcagtttaagagttggaataaatagaaggttcccccaaccaaaatcttcttttcttttgccacagtgcatatgactttagagcgtgctccgcgcccccccccccctcatctttttctttttgccttctctaaattgttgtaaaataactgaatggtcttgttttcctttgtttgggtcaagaaattttagctgaaaattgttactgtgtgaaagaagattattgactcaacaagccttcaattttccatgaataacactcccacccctagcttcgggtgcacgctgcgcatgcattctattttaaaatacagtctgtaatttaaaacaggcagttggatgccccactgaactttgtttaagcctggaataaaagagagagaaaagctttaagccgcaaaaaggtggctaagcctcctcaactgcttgtctttctaatgcatccatcctgttaaagagcgaagcttgcaggtaatgttgccagctggtgccacagctggtttcgcccagtttcaggctgtgctgtggagatctagtcgcttgtttccaagaccccaggagtgtccattggcactagccagtgtgtatgtgcttacacatatggtagttcaatgcatgtgtgaatattatttctgatattaattagttaattaatttttttcaaggcagggtttttctgtgtagccccggctgtccaggaactcaatctgtagaccagtctggcctcaagcgcagagatcctcctgcctctgccgcttgagttcaatgattaaaggcctgtgccttcaccacctggctctgattctaaatgagtaattttggcaatcatttgttataaggtagctactgttgtgttggtgttatataaaatggctttaggacacaaatgttgaccactggactgtttgctttctgagatttagaaagtgctcgcttggaagtagcgtgcatctttcaccttctcttccttacagaaacgaccaacttgccatgactcgtatggaaggcacgctctgtcaggggacctgcttgtgccagtgtttcgtggcctcagcccagctctgctcttgagtagctaagccatgctgcctcagggtgattgcttctcctctctggaaaatgacttctgtagactgagttgcctcaaaacacccttgatctccttcatggtcactgtaggccttttctgttagtatttaagaaagagcaatagagctgaactctcttccctccttacagagcagagcgtcaggtgcgtgaggtgagtctgcaggaggccctctgtgtggctcctactgcccctcatcctccatcctggtgccctttatatttttgtgaagggaaacatgggctttatttaggaactttggccaccaaagagcctagaccttgtttggccttttattaccagagacatgtagcagctcagaggctcccgctgtgccctgcttatgtgattcgtgtggtagtctttcttgggcaggagtacaggacgtctaggggaaaggcaagtccaggagaaagaagagaagcaagaacacctgtcggtcaccgtctccgcaggcctgctatacagtgcagggtggaaagcggttcaggagcaggctgcaggactcaagtcgtgtgcgctcgtgtgggtgtgcatgtgcgtgtgtgtaggccaagaatgtctccctgcactgggcaaaagggcagccagccttgtgaagcaagacagtctgtgttctctgaactcttcactcctttctaatgttgccaagtttattacatgtgctgttaaagttaccaaataaatactttgtttctacaaagattttagattttgatttgggaagtacagtgagtgtgttaccagtctttctgcttatctttactaatttttgctttctggcatgcgttgcgccatgacatggtgagcatccactgtaaagtaggccagacagagtgagtcacagtccaccaagggaaggtaacagcttcctgctaccccaccctccatctctgtgcactcttcagtgtccctaatgctgtgatgcggacagggtctttcctagtctttatttccccactgctgctgttgcctgcctaggagcagtgccagcccctgctcagcactgggggtcgggttgagcttttgtagttggctgctctggagtaaggctgccgtcaggtagtaacccagcaccttctgaggactgttttcaacaggcttacttgggagcgggcgcttcagtcaaagaattgcatgcactgctaataaaagaagagtcactgccctgggaggggccatgagctggaaagatgcctcccagggctctcagggtttctgtggctggacagcatggccctccccacagagtaatagtaaagccgttagctgttaggtgtcttcgtgggctgtctcactgactttgcttctaggatggcacagtgtgtgtttttaagaaatgtgatcccaggcgtggtggcacactggcacacgcctttaatcccagcactcgggaggcagaggcaggtggatttctgagttcgaggccagcctggtctacagagtgagttccaggacagccagggctacacagagaaaccctgtctcaaaaaacgaaagaaagaaagaaagaaagaaagaaagaaagaaagaaagaaagaaaggaagaaaggaagaaaggaagaaaggaaggaaggaaggaagaaagaaagatgaatgacagcaattttattctccagtggacatagattcctttgcattactcaatttgatatacttttgactgattgactgatttttgcctattttggaagaatatttcttagtttaatttgcttcaaattcctcttccctgaatgaatatatttttcgatgtatgcatttgtggacctagaatataattgtcttttttccttatggagggttcaagtgacagagaacttgattttttttttagcatgaaattttcagaagatgttctcttttagtctgtagaaaaggctaccccgttgagcagcgtgaattcagttgtacatttaaagtcctgcaaaggacatggtgcctgaagagattcttctcaacgctgcagatgtccttgctcttcctggccagggatacagctccacagcggagcagtttctcaccccgttgtacaaggtccaaggttagcgctccatccggactcaggaggggggagagctctccaccccagcccccaccggtgtcttcattctacaccaagcctctgcctgttgttccccaggggaacaggggcctttgctttagacatgcactggtttgggtttagtggactttttttttggttggttggtttttgtttttgtttttgttttatgctgttttaaatgctgttttatgagctaaacccggaacacattatagtctccaaagataattaacaaagcaaaacaggattaatattaaccagtttacatgtgtgcattttatgtatttaatttgattcagattttgtctgctttgagctcaaattcccagatgtggaaatagaaagtggcccgtggtcggctggccgacgcagtagcctcacttcagtccgctgcccatctctggcagctccgcccagctccaggcttcacaggttaccacgtgctgccctgccggcttcacactcacaatggggtgagctccctttgaagtgcaactattttgcccaaatattttttgagtaactccccttgccccttaggcttttcttagcatccctgtatgttgacatcttcaaatagggtacagactcactctcagaaattaaattacatttaacaattaatgattacttcttatgcctaaatgggtgtattagatgtaaaaataacaaaagaaataaattaaagttttaattatttcagtagtttcttatgagtgtcactagtatattattttgagacagggtctggtctcattgtgaagtccaggaccacttaaactcagaggactgcctgcctcagcctctctgctgctgagaggtgtagccatgtgccactgtgccttggttaaaattcgtttttttttttttttttttttttaactataacatcttccattgtaagcagtcaacaggggtacttaatattctttattgctaactaatatctacatacagttctagaattctcctttagcctcgcgattttgctgttttatcgaagtttccactgtttagcagtctaagcaaggctgcagggatgttctgccttaagctctctttggacagtgctgtgacactcctgtgcccatgctggctctagggaggacacggcacacgccctttgggttgagctcctcgtcttcctgtgagctacaggagcaccagctctcttggcagacttcttcagatatcttgattattgttacttggttgactttttaaacataaagacaggctattaaattcctacccatctttgatacattatggtcagtttggggttaatgatttttaactgtgtgttcaagctgaccttggtgatgccatctgtaggtctagctaccgtggattccacagcagggttgtttgaactcaggagttcaagaccaacttgaccaaacatagttaaggttgacaaaacattcatcattcatgcaagtacgttcagtaactttatggcctagagacttcatcttcaaccctttacatgtgtgtgcggcacaacacatacagatcctcactaaaacacgtcagtctatgcgcccccaccccacccccaccccgctttgcactcggagcctggggtccgtggctcaccaggcctttgaagcaggagtgcctctgccgaggcgggcaggtgcactgtgagcctgctgcctcagccctggtccctgacgccaagccccttgtgcatggctgtgtgagttctgcagtatggagcctgctgcgactcctcatttcagtgaggcttgttcacacagaaggaaagatgagacgaatgtagctggagattttatgataaaataaaaattcccacagacttggacttcctcttccttccttgttggactaccaaagccaaagtcatgtttgatcgggagcaactgataaagaggccaaaccctttagggttcacgtcataaactagatctgaggagttgcagacgtaggccaggcaggtggcattccaaagtgtcctgctcatccccgtgcccagtgtggtcttcagatgggagttggtgacagagcagcagttgtgacttgagttcacccttctggcttctacagaaagctctagacagcagatctggaggaagcctgagatggcccctcaggcttgcatgcactttcaagctaggcacccagtgctaccccttaattgaaactgcttgtgttgccaggtgacaaaggactgtaatccccacactcatctctaaaattaaaaaaatcacgcatgtgtgtgctcgcaggtatgtatgttcccctgtgcacatatatacgtgtgcaaatacacttggagagaggggaggaaggatatctgttaatagcaatattaaatggtaaccccatgtatgcggtctctgactcttcatcccagctgtttggatgatgataggtaaagccatcactttggggtatccatggcactcacaccttacggttcctcctccgggttctctgctgttccctcagtttcagttatcagtgtttaacacagagaccccatgaagatctggggaagattacagaggaaatgaacatgactgtctttgaagtggacaaacccctgttctcatttttagtggcagcctctggtgtccttggtgtcctgggcagctcagctctgcttttctgttcagctaaagacctaaggtacatacaacagtcggatgtgaaaggtaccataaagacatttcaccctccagatgctgtatttaatacaaagtgcgatccgacgctctaacctaatgctcaaagtctttttctctatggaagtgtatgaaagcggcttgggtgaattttcttgcagctgtccgttactgctttttgcttgagaattagaaagaaatgtgtttattttgtatggatcagtgggcacctttaatggcaagaagcttgctgtgacaaaggaccgggtctcctgtgaggtttgtattcaggctgtgcttctggaaggacttgagttgacctaaagtcacacattcctatgtaaagaaaagctgttctaagacattacaatttgttgggggtggggtaggatggaaaaacaaacgagcccggataatgatgtgaccgcaaatggaggtccagtttaaggctgcgtcccagctaccatggtaaagagagaaattcaaggttatataatttttaatataaaggcaaaattcgttatatcttagggaacttcaccttctatgattttgtagaaggaaatgttctataaagaaacataaaatgatcctgagaaaataatgaaactgatatggaaatagaggcctgttctgtgcagtaagagccgtgatcccatattatttggaagcttataggggtcttgaatgagaccttccggcccacgtgagtggacagggtcctgagtgaggccttaagtcccgcccacgtgatggacagttgaagtcccgcccacgtgatggacagttgaagtcccgcccacgtgatggacagttgaagggttttctagaactcgattgacttgtttaactgtcaaaattataaatctagcaattgtgttcaaaggagtggtttattgagcccatttttatatttcatggaaacttttaaaa

SEQ ID NO: 872 - DNA, 1092 bp, Mus musculus
tttcttcacagggcagcccgatggacccaatggtgatgaagagacctcagttgtatgggatgggtactcacccccactcccagccacagcagagcagcccatacccaggaggctcctacggtcccccaggtgcacagcggtatccccttggcatgcagggccgggctccaggggccctgggaggcttgcagtacccgcagcagcagatgccaccgcagtacggacagcaagctgtgagtggctactgccagcaaggccagcagccatactacaaccagcagccgcagccctcgcacctcccgccccaggcacagtacctgcagccggcggcggcgcagtcccagcagaggtaccagccacagcaggacatgtctcaagaaggctatggaactagatctcagcctcctctggcccctggaaaatccaaccatgaagacttgaatttaattcaacaggaaagaccatcgagtctaccagtaagacattactatgctgattggaaaatgtaatgggttaaaggattctgcaaacgattgttttgcctgctctgttttatattacacacaggagagaactttctaagtgtcagatttatttaagaactgttagctgttaggattctttcttgagagccaacactaagctctgagcaaagctaccttggcagtgtccacttctgtagctctcagtcatccagctctccttgctgctgtgtgggtttagatgtactgggatatcaattattgacgaagcttggcatatagcatgtaatgtaaaaattatcctgaagctctccctctgttaggacattagcatttgagtatactctagttttctttgctcatgaagcatgcgtgccaggaaaagacaggctggaaggtctgttacagcaaaccctgtagagtatatactctgttattttgcagatcttgggtgtatctcaatttgtagtgtggtgaagtgcactggcccctgagtgttctgcagacctgtttctcgtaacactcgccaatgctttcatcacagttgctatggttaccttgactccttggtttagaccctgatccttttatataaaacgttttttaaaac

SEQ ID NO: 873 - protein, 162 aa, Mus musculus
MDPMVMKRPQLYGMGTHPHSQPQQSSPYPGGSYGPPGAQRYPLGMQGRAPGALGGLQYPQQQMPPQYGQQAVSGYCQQGQQPYYNQQPQPSHLPPQAQYLQPAAAQSQQRYQPQQDMSQEGYGTRSQPPLAPGKSNHEDLNLIQQERPSSLPVRHYYADWKM
